United States Patent Application Publication US 2024/0117295 A1 - sequence listing, part 5

SEQ ID NO: 5 - DNA, 3977413 bp, Artificial Sequence (residues 1-1,988,707 of 3,977,413)
  Synthetic E.coli genome
agcttttcattctgactgcaacgggcaatatgtctctgtgtggattaaaaaaagagtgtctgatagcagcttctgaactggttacctgccgtgagtaaattaaaattttattgacttaggtcactaaatactttaaccaatataggcatagcgcacagacagataaaaattacagagtacacaacatccatgaaacgcattagcaccaccattaccaccaccatcaccattaccacaggtaacggtgcgggctgacgcgtacaggaaacacagaaaaaagcccgcacctgacagtgcgggctttttttttcgaccaaaggtaacgaggtaacaaccatgcgagtgttgaagttcggcggtacaagtgtggcaaatgcagaacgttttctgcgtgttgccgatattctggaaagcaatgccaggcaggggcaggtggccaccgtcctctctgcccccgccaaaatcaccaaccacctggtggcgatgattgaaaaaaccattagcggccaggatgctttacccaatatcagcgatgccgaacgtatttttgccgaacttttgacgggactcgccgccgcccagccggggttcccgctggcgcaattgaaaactttcgtcgatcaggaatttgcccaaataaaacatgtcctgcatggcattagtttgttggggcagtgcccggatagcatcaacgctgcgctgatttgccgtggcgagaaaatgagcatcgccattatggccggcgtattagaagcgcgcggtcacaacgttactgttatcgatccggtcgaaaaactgctggcagtggggcattacctcgaatctaccgtcgatattgctgagtccacccgccgtattgcggcaagccgcattccggctgatcacatggtgctgatggcaggtttcaccgccggtaatgaaaaaggcgaactggtggtgcttggacgcaacggttccgactactctgctgcggtgctggctgcctgtttacgcgccgattgttgcgagatttggacggacgttgacggggtctatacctgcgacccgcgtcaggtgcccgatgcgaggttgttgaagagcatgtcctaccaggaagcgatggagctttcctacttcggcgctaaagttcttcacccccgcaccattacccccatcgcccagttccagatcccttgcctgattaaaaataccggaaatcctcaagcaccaggtacgctcattggtgccagccgtgatgaagacgaattaccggtcaagggcatttccaatctgaataacatggcaatgttcagcgtttctggtccggggatgaaagggatggtcggcatggcggcgcgcgtctttgcagcgatgagtcgcgcccgtatttccgtggtgctgattacgcaaagttcttccgaatacagcatcagtttctgcgttccacaaagcgactgtgtgcgagctgaacgggcaatgcaggaagagttctacctggaactgaaagaaggcttactggagccgctggcagtgacggaacggctggccattatcagcgtggtaggtgatggtatgcgcaccttgcgtgggatcagcgcgaaattctttgccgcactggcccgcgccaatatcaacattgtcgccattgctcagggatcttctgaacgcagtatctctgtcgtggtaaataacgatgatgcgaccactggcgtgcgcgttactcatcagatgctgttcaataccgatcaggttatcgaagtgtttgtgattggcgtcggtggcgttggcggtgcgctgctggagcaactgaagcgtcagcaaagctggctgaagaataaacatatcgacttacgtgtctgcggtgttgccaacagcaaggctctgctcaccaatgtacatggccttaatctggaaaactggcaggaagaactggcgcaagccaaagagccgtttaatctcgggcgcttaattcgcctcgtgaaagaatatcatctgctgaacccggtcattgttgactgcacttccagccaggcagtggcggatcaatatgccgacttcctgcgcgaaggtttccacgttgtcacgccgaacaaaaaggccaacaccagcagcatggattactaccatcagttgcgttatgcggcggaaaaaagccggcgtaaattcctctatgacaccaacgttggggctggattaccggttattgagaacctgcaaaatctgctcaatgcaggtgatgaattgatgaagttctccggcattctttctggtagcctttcttatatcttcggcaagttagacgaaggcatgagtttctccgaggcgaccacgctggcgcgggaaatgggttataccgaaccggacccgcgagatgatctttctggtatggatgtggcgcgtaaactattgattctcgctcgtgaaacgggacgtgaactggagctggcggatattgaaattgaacctgtgctgcccgcagagtttaacgccgagggtgatgttgccgcttttatggcgaatctgagtcaactcgacgatctctttgccgcgcgcgtggcgaaggcccgtgatgaaggaaaagttttgcgctatgttggcaatattgatgaagatggcgtctgccgcgtgaagattgccgaagtggatggtaatgatccgctgttcaaagtgaaaaatggcgaaaacgccctggccttctatagccactattatcagccgctgccgttggtactgcgcggatatggtgcgggcaatgacgttacagctgccggtgtctttgctgatctgctacgtaccctcagttggaagttaggagtctgacatggttaaagtttatgccccggcttccagtgccaatatgagcgtcgggtttgatgtgctcggggcggcggtgacacctgttgatggtgcattgctcggagatgtagtcacggttgaggcggcagagacattcagtctcaacaacctcggacgctttgccgataagctgccgagtgaaccacgggaaaatatcgtttatcagtgctgggagcgtttttgccaggaactgggtaagcaaattccagtggcgatgaccctggaaaagaatatgccgatcggtagcggcttaggctccagtgcctgtagcgtggtcgcggcgctgatggcgatgaatgaacactgcggcaagccgcttaatgacactcgtttgctggctttgatgggcgagctggaaggccgtatctccggcagcattcattacgacaacgtggcaccgtgttttctcggtggtatgcagttgatgatcgaagaaaacgacatcatcagccagcaagtgccagggtttgatgagtggctgtgggtgctggcgtatccggggattaaagtcagcacggcagaagccagggctattttaccggcgcagtatcgccgccaggattgcattgcgcacgggcgacatctggcaggcttcattcacgcctgctattcccgtcagcctgagcttgccgcgaagctgatgaaagatgttatcgctgaaccctaccgtgaacggttactgccaggcttccggcaggcgcggcaggcggtcgcggaaatcggcgcggtagcgagcggtatctccggctccggcccgaccttgttcgctctgtgtgacaagccggaaaccgcccagcgcgttgccgactggttgggtaagaactacctgcaaaatcaggaaggttttgttcatatttgccggctggatacggcgggcgcacgagtactggaaaactaaatgaaactctacaatctgaaagatcacaacgagcaggtcagctttgcgcaagccgtaacccaggggttgggcaaaaatcaggggctgttttttccgcacgacctgccggaattcagcctgactgaaattgatgagatgctgaagctggattttgtcacccgcagtgcgaagatcctcagcgcgtttattggtgatgaaatcccacaggaaatcctggaagagcgcgtgcgcgcggcgtttgccttcccggctccggtcgccaatgttgaaagcgatgtcggttgtctggaattgttccacgggccaacgctggcatttaaagatttcggcggtcgctttatggcacaaatgctgacccatattgcgggtgataagccagtgaccattctgaccgcgacctccggtgataccggagcggcagtggctcatgctttctacggtttaccgaatgtgaaagtggttatcctctatccacgaggcaaaatcagtccactgcaagaaaaactgttctgtacattgggcggcaatatcgaaactgttgccatcgacggcgatttcgatgcctgtcaggcgctggtgaagcaggcgtttgatgatgaagaactgaaagtggcgctagggttaaacagcgctaacagcattaacatcagccgtttgctggcgcagatttgctactactttgaagctgttgcgcagctgccgcaggagacgcgcaaccagctggttgtcagcgtgccaagcggaaacttcggcgatttgacggcgggtctgctggcgaagagtctcggtctgccggtgaaacgttttattgctgcgaccaacgtgaacgataccgtgccacgtttcctgcacgacggtcagtggagtcccaaagcgactcaggcgacgttatccaacgcgatggacgtgagtcagccgaacaactggccgcgtgtggaagagttgttccgccgcaaaatctggcaactgaaagagctgggttatgcagccgtggatgatgaaaccacgcaacagacaatgcgtgagttaaaagaactgggctacactagcgagccgcacgctgccgtagcttatcgtgcgctgcgtgatcagttgaatccaggcgaatatggcttgttcctcggcaccgcgcatccggcgaaatttaaagagagcgtggaagcgattctcggtgaaacgttggatctgccaaaagagctggcagaacgtgctgatttacccttgcttagtcataatctgcccgccgattttgctgcgttgcgtaaattgatgatgaatcatcagtaaaatctattcattatctcaatcaggccgggtttgcttttatgcagcccggcttttttatgaagaaattatggagaaaaatgacagggaaaaaggagaaattctcaataaatgcggtaacttagagattaggattgcggagaataacaaccgccgttctcatcgagtaatctccggatatcgacccataacgggcaatgataaaaggagtaacctgtgaaaaagatgcaatctatcgtactcgcactttccctggttctggtcgctcccatggcagcacaggctgcggaaattacgttagtcccgagtgtaaaattacagataggcgatcgtgataatcgtggctattactgggatggaggtcactggcgcgaccacggctggtggaaacaacattatgaatggcgaggcaatcgctggcacctacacggaccgccgccaccgccgcgccaccataagaaagctcctcatgatcatcacggcggtcatggtccaggcaaacatcaccgctaaatgacaaatgccgggtaacaatccggcattcagcgcctgatgcgacgctggcgcgtcttatcaggcctacgttaattctgcaatatattgaatctgcatgcttttgtaggcaggataaggcgttcacgccgcatccggcattgactgcaaacttaacgctgctcgtagcgtttaaacaccagttcgccattgctggaggaatcttcatcaaagaagtaaccttcgctattaaaaccagtcagttgctctggtttggtcagccgattttcaataatgaaacgactcatcagaccgcgtgctttcttagcgtagaagctgatgatcttaaatttgccgttcttctcatcgaggaacaccggcttgataatctcggcattcaatttcttcggcttcacgcttttaaaatactcatcactcgccagattaatcaccacattatcgccttgtgctgcgagcgcctcgttcagcttgttggtgatgatatctccccagaattgatacagatctttccctcgggcattctcaagacggatccccatttccagacgataaggctgcattaaatcgagcgggcggagtacgccatacaagccggaaagcattcgcaaatgctgttgggcaaaatcgaaatcgtcttcgctgaaggtttcggcctgcaagccggtgtagacatcacctttaaacgccagaatcgcctggcgggcattcgccggcgtgaaatctggctgccagtcatgaaagcgagcggcgttgatacccgccagtttgtcgctgatgcgcatcagcgtgctaatctgcggaggcgtcagtttccgcgcctcatggatcaactgctgggaattgtctaacagctccggcagcgtatagcgcgtggtggtcaacgggctttggtaatcaagcgttttcgcaggactaataagaatcagcatatccagtccttgcaggaaatttatgccgactttagcaaaaaatgagaatgagttgatcgatagttgtgattactcctggctaacatcatcccacgcgtccggagaaagctggcgaccgatatccggataacgcaatggatcaaacaccgggcgcacgccgagtttacgctggcgtagataatcactggcaatggtatgaaccacagggctgagcagtaaaatggcggtcaaattggtaatagccatgcaggccattatgatatctgccagttgccacatcagcggaaggcttagcaaggtgccgccgatgaccgttgcgaaggtgcagatccgcaaacaccagatcgctttagggttgttcaggcgtaaaaagaagagattgttttcggcataaatgtagttggcaacgatggagctgaaggcaaacagaataaccacaagggtaacaaactcagcaccccaggaacccattagcacccgcatcgccttctggataagctgaataccttccagcggcatgtaggttgtgccgttacccgccagtaatatcagcatggcgcttgccgtacagatgaccagggtgtcgataaaaatgccaatcatctggacaatcccttgcgctgccggatgcggaggccaggacgccgctgccgctgccgcgtttggcgtgctacccattcccgcctcattggaaaacatactgcgctgaaaaccgttagtaatcgcctggcttaaggtatatcccgccgcgccgcctgccgcttcctgccagccaaaagcactctcaaaaatagaccaaatgacgtggggaagttgcccgatattcattacgcaaattaccaggctggtcagtacccagattatcgccatcaacgggacaaagccctgcatgagccgggcgacgccatgaagaccgcgagtgattgccagcagagtaaagacagcgagaataatgcctgtcaccagcgggggaaaatcaaaagaaaaactcagggcgcgggcaacggcgttcgcttgaactccgctgaaaattatgccataggcgatgagcaaaaagacggcgaacagaacgcccatccagcgcatccccagcccgcgcgccatataccatgccggtccgccacgaaactgcccattgacgtcacgttctttataaagttgtgccagagaacattcggcaaagctggtcgccatgccgataaacgcggcaacccacatccaaaagacggctccaggtccaccggcggtaatagccagcgcaacgccggccaggttgccgctacccacgcgcgccgcaagactggtacacaaactctgaaaactggttaaaccgcctggctgtggatgaatgctatttttaagacttttgccaaactggcggatgtagcgaaactgcacaaatccggtgcgaaaagtgaaccaacaacctgcgccgaagagcaggtaaatcattacgcttccccaaaggacgctgttaatgaaggagaaaaaatctggcatgcatatccctcttattgccggccgcgatgactttcctgtgtaaacgttaccaattgtttaagaagtatatacgctacgaggtacttgataacttctgcgtagcatacatgaggttttgtataaaaatggcgggcgatatcaacgcagtgtcagaaatccgaaacagtctcgcctggcgataaccgtcttgtcggcggttgcgctgacgttgcgtcgtgatatcatcagggcagaccggttacatccccctaacaagctgtttaaagagaaatactatcatgacggacaaattgacctcccttcgtcagtacaccaccgtagtggccgacactggggacatcgcggcaatgaagctgtatcaaccgcaggatgccacaaccaacccttctctcattcttaacgcagcgcagattccggaataccgtaagttgattgatgatgctgtcgcctgggcgaaacagcagagcaacgatcgcgcgcagcagatcgtggacgcgaccgacaaactggcagtaaatattggtctggaaatcctgaaactggttccgggccgtatcagtactgaagttgatgcgcgtctttcctatgacaccgaagcgagtattgcgaaagcaaaacgcctgatcaaactctacaacgatgctggtattagcaacgatcgtattctgatcaaactggcttctacctggcagggtatccgtgctgcagaacagctggaaaaagaaggcatcaactgtaacctgaccctgctgttctccttcgctcaggctcgtgcttgtgcggaagcgggcgtgttcctgatcagcccgtttgttggccgtattcttgactggtacaaagcgaataccgataagaaagagtacgctccggcagaagatccgggcgtggtttctgtatctgaaatctaccagtactacaaagagcacggttatgaaaccgtggttatgggcgcaagcttccgtaacatcggcgaaattctggaactggcaggctgcgaccgtctgaccatcgcaccggcactgctgaaagagctggcggagagcgaaggggctatcgaacgtaaactgtcttacaccggcgaagtgaaagcgcgtccggcgcgtatcactgagtccgagttcctgtggcagcacaaccaggatccaatggcagtagataaactggcggaaggtatccgtaagtttgctattgaccaggaaaaactggaaaaaatgatcggcgatctgctgtaatcattcttagcgtgaccgggaagtcggtcacgctacctcttctgaagcctgtctgtcactcccttcgcagtgtatcattctgtttaacgagactgtttaaacggaaaaatcttgatgaatactttacgtattggcttagtttccatctctgatcgcgcatccagcggcgtttatcaggataaaggcatccctgcgctggaagaatggctgacaagcgcgctaaccacgccgtttgaactggaaacccgcttaatccccgatgagcaggcgatcatcgagcaaacgttgtgtgagctggtggatgaaatgagttgccatctggtgctcaccacgggcggaactggcccggcgcgtcgtgacgtaacgcccgatgcgacgctggcagtagcggaccgcgagatgcctggctttggtgaacagatgcgccagatcagcctgcattttgtaccaactgcgatccttagccgtcaggtgggcgtgattcgcaaacaggcgctgatccttaacttacccggtcagccgaagtctattaaagagacgctggaaggtgtgaaggacgctgagggtaacgttgtggtacacggtatttttgccagcgtaccgtactgcattcagttgctggaagggccatacgttgaaacggcaccggaagtggttgcagcattcagaccgaagagtgcaagacgcgacgttagcgaataaaaaaatccccccgagcggggggatctcaaaacaattagtgggattcaccaatcggcagaacggtgcgaccaaactgctcgttcagtacttcacccatcgccagatagattgcgctggcaccgcagatcagcccaatccagccggcaaagtggatgattgcggcgttaccggcaatgttaccgatcgccagcagggcaaacagcacggtcaggctaaagaaaacgaattgcagaacgcgtgcgcctttcagcgtgccgaagaacataaacagcgtaaatacgccccacagacccaggtagacaccaaggaactgtgcatttggcgcatcggtcagacccagtttcggcatcagcagaatcgcaaccagcgtcagccagaaagaaccgtaagaggtgaatgcggttaaaccgaaagtgttgccttttttgtactccagcagaccagcaaaaatttgcgcgatgccgccgtagaaaatgcccatggcaagaataatgccgtccagagcgaaataacccacgttgtgcaggttaagcagaatggtggtcatgccgaagcccatcaggcccagcggtgccggattagccaacttagtgttgcccataattcctcaaaaatcatcatcgaatgaatggtgaaataatttccctgaataactgtagtgttttcagggcgcggcataataatcagccagtggggcagtgtctacgatcttttgaggggaaaatgaaaattttccccggtttccggtatcagacctgagtggcgctaaccatccggcgcaggcaggcgatttgcagtacggctggaatcgtcacgcgataggcgctgccgctgaccgctttaaccccatttagtgccgcacctacagggcctcccagccccgcgccgcgcagcaaaccatgcccaagtacgctcattgctgcgtgggtgcgtaaaatgcgggtcagttggctggaaagcaaatggctcacaccttttgccaataatttgtctttcatcagcagcggcagcagctcttccagctcattcaccctggcatcgaccgcgtgcagaaactcctgcttatgttcctcgtccattttcttccaggtattacgcagaaattgttccagtaactgttgctcaatttcaaacgtagacatctctttgtcggctttcagcttcaatcgcttactaacatcgagcaaaatggcccgatacaatttaccgtgtccgcgcagtttgttggcgatactatcgccaccaaaatgctgtaattctccggcaatcagctgccagttgcggcgatgttgctcgggatgcccttccatgcttttaaacagttcgttgcgcatcagtacgctggagaggcgagttttgcctttttcattatgggtgagcaatcgggcgaaatttgccaactgttcctcactacaatgctgaagaaaatccagatcactatcattcaggtaattaacattcattttttgtggcttctatattctggcgttagtcgtcgccgataattttcagcgtggccatatcgctactgttcaccgtatgaccgctaaaggtgattttactgacgcagcgtttattgtcgttatcgctgttaatgttgatccagtcagtggtttgcccttcttttatttcactaggaatattcaggctctgactggcgctacgggcggctttgaaataaacgcttgcaccgcttaactgtaaatcgccatggtcggcagagagttgtatgcgtttcacaatgcgacaaacaggaagtttcagcgccagatcgttggtttcgttacgcggcattgcaatggcgccgaggagtttatggtcgtttgcctgcgccgtgcagcacagcatcaggctaatcgccaggctggcggaaatcgtaaaaacggatttcataaggattctcttagtgggaagaggtagggggatgaatacccactagtttactgctgataaagagaagattcaggcacgtaatcttttctttttattacaattttttgatgaatgccttggctgcgattcattctttatatgaataaaattgctgtcaattttacgtcttgtcctgccatatcgcgaaatttctgcgcaaaagcacaaaaaatttttgcatctcccccttgatgacgtggtttacgaccccatttagtagtcaaccgcagtgagtgagtctgcaaaaaaatgaaattgggcagttgaaaccagacgtttcgcccctattacagactcacaaccacatgatgaccgaatatatagtggagacgtttagatgggtaaaataattggtatcgacctgggtactaccaactcttgtgtagcgattatggatggcaccactcctcgcgtgctggagaacgccgaaggcgatcgcaccacgccttctatcattgcctatacccaggatggtgaaactctagttggtcagccggctaaacgtcaggcagtgacgaacccgcaaaacactctgtttgcgattaaacgcctgattggtcgccgcttccaggacgaagaagtacagcgtgatgtttccatcatgccgttcaaaattattgctgctgataacggcgacgcatgggtcgaagttaaaggccagaaaatggcaccgccgcagatttctgctgaagtgctgaaaaaaatgaagaaaaccgctgaagattacctgggtgaaccggtaactgaagctgttatcaccgtaccggcatactttaacgatgctcagcgtcaggcaaccaaagacgcaggccgtatcgctggtctggaagtaaaacgtatcatcaacgaaccgaccgcagctgcgctggcttacggtctggacaaaggcactggcaaccgtactatcgcggtttatgacctgggtggtggtactttcgatatttctattatcgaaatcgacgaagttgacggcgaaaaaaccttcgaagttctggcaaccaacggtgatacccacctggggggtgaagacttcgacagccgtctgatcaactatctggttgaagaattcaagaaagatcagggcattgacctgcgcaacgatccgctggcaatgcagcgcctgaaagaagcggcagaaaaagcgaaaatcgaactgtcttccgctcagcagaccgacgttaacctgccatacatcactgcagacgcgaccggtccgaaacacatgaacatcaaagtgactcgtgcgaaactggaaagcctggttgaagatctggtaaaccgttccattgagccgctgaaagttgcactgcaggacgctggcctgtccgtatctgatatcgacgacgttatcctcgttggtggtcagactcgtatgccaatggttcagaagaaagttgctgagttctttggtaaagagccgcgtaaagacgttaacccggacgaagctgtagcaatcggtgctgctgttcagggtggtgttctgactggtgacgtaaaagacgtactgctgctggacgttaccccgctgtctctgggtatcgaaaccatgggcggtgtgatgacgacgctgatcgcgaaaaacaccactatcccgaccaagcacagccaggtgttctctaccgctgaagacaaccagtctgcggtaaccatccatgtgctgcagggtgaacgtaaacgtgcggctgataacaaatctctgggtcagttcaacctagatggtatcaacccggcaccgcgcggcatgccgcagatcgaagttaccttcgatatcgatgctgacggtatcctgcacgtttccgcgaaagataaaaacagcggtaaagagcagaagatcaccatcaaggcttcttctggtctgaacgaagatgaaatccagaaaatggtacgcgacgcagaagctaacgccgaagctgaccgtaagtttgaagagctggtacagactcgcaaccagggcgaccatctgctgcacagcacccgtaagcaggttgaagaagcaggcgacaaactgccggctgacgacaaaactgctatcgagtctgcgctgactgcactggaaactgctctgaaaggtgaagacaaagccgctatcgaagcgaaaatgcaggaactggcacaggtttcccagaaactgatggaaatcgcccagcagcaacatgcccagcagcagactgccggtgctgatgcttctgcaaacaacgcgaaagatgacgatgttgtcgacgctgaatttgaagaagtcaaagacaaaaaataatcgccctataaacgggtaattatactgacacgggcgaaggggaatttcctctccgcccgtgcattcatctaggggcaatttaaaaaagatggctaagcaagattattacgagattttaggcgtttccaaaacagcggaagagcgtgaaatcagaaaggcctacaaacgcctggccatgaaataccacccggaccgtaaccagggtgacaaagaggccgaggcgaaatttaaagagatcaaggaagcttatgaagttctgaccgacagccaaaaacgtgcggcatacgatcagtatggtcatgctgcgtttgagcaaggtggcatgggcggcggcggttttggcggcggcgcagacttcagcgatatttttggtgacgttttcggcgatatttttggcggcggacgtggtcgtcaacgtgcggcgcgcggtgctgatttacgctataacatggagctcaccctcgaagaagctgtacgtggcgtgaccaaagagatccgcattccgactctggaagagtgtgacgtttgccacggtagcggtgcaaaaccaggtacacagccgcagacttgtccgacctgtcatggttctggtcaggtgcagatgcgccagggattcttcgctgtacagcagacctgtccacactgtcagggccgcggtacgctgatcaaagatccgtgcaacaaatgtcatggtcatggtcgtgttgagcgcagcaaaacgctgtccgttaaaatcccggcaggggtggacactggagaccgcatccgtcttgcgggcgaaggtgaagcgggcgagcatggcgcaccggcaggcgatctgtacgttcaggttcaggttaaacagcacccgattttcgagcgtgaaggcaacaacctgtattgcgaagtcccgatcaacttcgctatggcggcgctgggtggcgaaatcgaagtaccgacccttgatggtcgcgtcaaactgaaagtgcctggcgaaacccagaccggtaagctattccgtatgcgcggtaaaggcgtcaagtctgtccgcggtggcgcacagggtgatttgctgtgccgcgttgtcgtcgaaacaccggtaggcctgaacgaaaggcagaaacagctgctgcaagagctgcaagaaagcttcggtggcccaaccggcgagcacaacagcccgcgcagtaagagcttctttgatggtgtgaagaagttttttgacgacctgacccgctaacctccccaaaagcctgcccgtgggcaggcctgggtaaaaatagggtgcgttgaagatatgcgagcacctgtaaagtggcggggatcactctacctcaatgtgtatcacaatatccatattctttgtgggggagtctggagattgagtagatattcttgttcagaatgtatcagccgatggttctacgattcttaagccacgaagagttcagatagtacaacggcatgtctcttttgactatctggcaaccggcagtgtgttctctcacgcatcacaaaagcagcaggcataaaaaaacccgcttgcgcgggctttttcacaaagcttcagcaaattggcgattaagccagtttgttgatctgtgcagtcaggttagccttatgacgtgcagctttgtttttgtggatcagacctttagcagcctgacggtccacgatcggttgcatttcgttaaatgctttctgtgcagcagctttgtcgccagcttcgatagctgcgtatactttcttgatgaaagtacgcatcatagagcgacggcttgcgttgtgcttacgagccttttcagactgaatggcgcgcttcttagcacttttgatattagccaaggtccaactcccaaatgtgttctatatggacaattcaaaggccgaggaatatgcccttttagccttcttttgtcaatggatttgtgcaaataagcgccgttaatgtgccggcacagcttacgtagtgatggcgcaggattctaccagcttgcggggtgtgaatacagcttttccgcgataaaaattgcagcaggcggtcagtttcttcccgtgatttgcgccatggcaatgaaaagccacttctttctgattagcgtactcaatcgccggttaaccttgaccgctgtacaaggtatactcggacgatttagcctgttttgagccagacatgaagctgatacgcggcatacataatctcagccaggccccgcaagaagggtgtgtgctgactattggtaatttcgacggcgtgcatcgcggtcatcgcgcgctgttacagggcttgcaggaagaagggcgcaagcgcaacttaccggtgatggtgatgctttttgaacctcaaccactggaactgtttgctaccgataaagccccggcaagactgacccggctgcgggaaaaactgcgttaccttgcagagtgtggcgttgattacgtgctgtgcgtgcgtttcgacaggcgtttcgcggcgttaaccgcgcaaaatttcatcagcgatcttctggtgaagcatttgcgcgtaaaatttcttgccgtaggtgatgatttccgctttggcgctggtcgtgaaggcgatttcttgttattacagaaagctggcatggaatacggcttcgatatcaccagtacgcaaactttttgcgaaggtggcgtgcgcatcagcagcaccgccgtgcgtcaggcccttgcggatgacaatctggctctggcagagagtttactggggcacccgtttgccatctccgggcgtgtagtccacggtgatgaattagggcgcactataggtttcccgacggcgaatgtaccgctgcgccgtcaggtttccccggtgaaaggggtttatgcggtagaagtgctgggcctcggtgaaaagccgttacccggcgtggcaaacatcggaacacgcccaacggttgccggtattcgccagcagctggaagtgcatttgttagatgttgcaatggacctttacggtcgccatatacaagtagtgctgcgtaaaaaaatacgcaatgagcagcgatttgcgagcctggacgaactgaaagcgcagattgcgcgtgatgaattaaccgcccgcgaattttttgggctaacaaaaccggcttaagcctgttatgtaatcaaaccgaaatacggaaccgagaatctgatgagtgactataaaagtaccctgaatttgccggaaacagggttcccgatgcgtggcgatctcgccaagcgcgaacccggaatgctggcgcgttggactgatgatgatctgtacggcatcatccgtgcggctaaaaaaggcaaaaaaaccttcattctgcatgatggccctccttatgcgaatggcagcattcatattggtcacagcgttaacaagattctgaaagacattatcgtgaagtccaaagggctttccggttatgacagcccgtatgtgcctggctgggactgccacggtctgccgatcgagctgaaagtcgagcaagaatacggtaagccgggtgagaaattcaccgccgccgagttccgcgccaagtgccgcgaatacgcggcgacccaggttgacggtcaacgcaaagactttatccgtctgggcgtgctgggcgactggagccacccgtacctgaccatggacttcaaaactgaagccaacatcatccgcgcgctgggcaaaatcatcggcaacggtcacctgcacaaaggcgcgaagccagttcactggtgcgttgactgccgttctgcgctggcggaagcggaagttgagtattacgacaaaacttctccgtccatcgacgttgctttccaggcagtcgatcaggatgcactgaaagcaaaatttgccgtaagcaacgttaacggcccaatcagcctggtaatctggaccaccacgccgtggactctgcctgccaaccgcgcaatctctattgcaccagatttcgactatgcgctggtgcagatcgacggtcaggccgtgattctggcgaaagatctggttgaaagcgtaatgcagcgtatcggcgtgaccgattacaccattctcggcacggtaaaaggtgcggagcttgagctgctgcgctttacccatccgtttatgggcttcgacgttccggcaatcctcggcgatcacgttaccctggatgccggtaccggtgccgttcacaccgcgcctggccacggcccggacgactatgtgatcggtcagaaatacggcctggaaaccgctaacccggttggcccggacggcacttatctgccgggcacttatccgacgctggatggcgtgaacgtcttcaaagcgaacgacatcgtcgttgcgctgctgcaggaaaaaggcgcgctgctgcacgttgagaaaatgcagcacagctatccgtgctgctggcgtcacaaaacgccgatcatcttccgcgcgacgccgcagtggttcgtcagcatggatcagaaaggtctgcgtgcgcagagtctgaaagagatcaaaggcgtgcagtggatcccggactggggccaggcgcgtatcgagagcatggttgctaaccgtcctgactggtgtatctcccgtcagcgcacctggggtgtaccgatgagtctgttcgtgcacaaagacacggaagagctgcatccgcgtacccttgaactgatggaagaagtggcaaaacgcgttgaagtcgatggcatccaggcgtggtgggatctcgatgcgaaagagatcctcggcgacgaagctgatcagtacgtgaaagtgccggacacattggatgtatggtttgactccggatctacccactcttctgttgttgacgtgcgtccggaatttgccggtcacgcagcggacatgtatctggaaggttctgaccaacaccgcggctggttcatgtcttccctaatgatctccaccgcgatgaagggtaaagcgccgtatcgtcaggtactgacccacggctttaccgtggatggtcagggccgcaagatgtctaaatccatcggcaataccgttagcccgcaggatgtgatgaacaaactgggcgcggatattctgcgtctgtgggtggcaagtaccgactacaccggtgaaatggccgtttctgacgagatcctgaaacgtgctgccgatagctatcgtcgtatccgtaacaccgcgcgcttcctgctggcaaacctgaacggttttgatccagcaaaagatatggtgaaaccggaagagatggtggtactggatcgctgggccgtaggttgtgcgaaagcggcacaggaagacatcctcaaggcgtacgaagcatacgatttccacgaagtggtacagcgtctgatgcgcttctgctccgttgagatgggttccttctacctcgacatcatcaaagaccgtcagtacaccgccaaagcggacagtgtggcgcgtcgtagctgccagactgcgctatatcacatcgcagaagcgctggtgcgctggatggcaccaatcctctccttcaccgctgatgaagtgtggggctacctgccgggcgaacgtgaaaaatacgtcttcaccggtgagtggtacgaaggcctgtttggcctggcagacagtgaagcgatgaacgatgcgttctgggacgagctgttgaaagtgcgtggcgaagtgaacaaagtcattgagcaagcgcgtgccgacaagaaagtgggtggcagcctggaagcggcagtaaccttgtatgcagaaccggaactgagcgcgaaactgaccgcgctgggcgatgaattacgatttgtcctgttgacctccggcgctaccgttgcagactataacgacgcacctgctgatgctcagcagagcgaagtactcaaagggctgaaagtcgcgttgagtaaagccgaaggtgagaagtgcccacgctgctggcactacacccaggatgtcggcaaggtggcggaacacgcagaaatctgcggccgctgtgtcagcaacgtcgccggtgacggtgaaaaacgtaagtttgcctgatgagtcaaagcatctgtagtacagggctacgctggctgtggctggtggtagtcgtgctgattatcgatctgggcagcaaatacctgatcctccagaactttgctctgggggatacggtcccgctgttcccgagccttaatctgcattatgcgcgtaactatggcgcggcgtttagtttccttgccgatagcggcggctggcagcgttggttctttgccggtattgcgattggtattagcgtgatcctggcagtgatgatgtatcgcagcaaggccacgcagaagctaaacaatatcgcttacgcgctgattattggcggcgcgctgggcaacctgttcgaccgcctgtggcacggcttcgttgtcgatatgatcgacttctacgtcggcgactggcacttcgccaccttcaaccttgccgatactgccatctgtgtcggtgcggcactgattgtgctggaaggttttttgccttctagagcgaaaaaacaataataaaccctgccggatgcgatgctgacgcatcttatccggcctacagattgctgcgaaatcgtaggccggataaggcgtttacgccgcatccggcaaaaatccttaaatataagagcaaacctgcatgtctgaatctgtacagagcaatagcgccgtcctggtgcacttcacgctaaaactcgacgatggcaccaccgccgagtctacccgcaacaacggtaaaccggcgctgttccgcctgggtgatgcttctctttctgaagggctggagcaacacctgttggggctgaaagtgggcgataaaaccaccttcagcttggagccagatgcggcgtttggcgtgccgagtccggacctgattcagtacttctcccgccgtgaatttatggatgcaggcgagccagaaattggcgcaatcatgctttttaccgcaatggatggcagtgagatgcctggcgtgatccgcgaaattaacggcgactccattaccgttgatttcaaccatccgctggccgggcagaccgttcattttgatattgaagtgctggaaatcgatccggcactggaggcgtaacatgcagatcctgttggccaacccgcgtggtttttgtgccggggtagaccgcgctatcagcattgttgaaaacgcgctggccatttacggcgcaccgatatatgtccgtcacgaagtggtacataaccgctatgtggtcgatagcttgcgtgagcgtggggctatctttattgagcagattagcgaagtaccggacggcgcgatcctgattttctccgcacacggtgtttctcaggcggtacgtaacgaagcaaaaagtcgcgatttgacggtgtttgatgccacctgtccgctggtgaccaaagtgcatatggaagtcgcccgcgccagtcgccgtggcgaagaatctattctcatcggtcacgccgggcacccggaagtggaagggacaatgggccagtacagtaacccggaagggggaatgtatctggtcgaaagcccggacgatgtgtggaaactgacggtcaaaaacgaagagaagctctcctttatgacccagaccacgctgagcgtggatgacacgtctgatgtgatcgacgcgctgcgtaaacgcttcccgaaaattgtcggtccgcgcaaagatgacatctgctacgccacgactaaccgtcaggaagcggtacgcgccctggcagaacaggcggaagttgtgttggtggtcggtagcaaaaactcctccaactccaaccgtctggcggagctggcccagcgtatgggcaaacgcgcgtttttgattgacgatgcgaaagacatccaggaagagtgggtgaaagaggttaaatgcgtcggcgtgactgcgggcgcaagcgctccggatattctggtgcagaatgtggtggcgcgtttgcagcagctgggcggtggtgaagccattccgctggaaggccgtgaagaaaacattgttttcgaagtgccgaaagagctgcgtgtcgatattcgtgaagtcgattaagtcattagcagcctaagttatgcgaaaatgccggtcttgttaccggcattttttatggagaaaacatgcgtttacctatcttcctcgatactgaccccggcattgacgatgccgtcgccattgccgccgcgatttttgcacccgaactcgacctgcaactgatgaccaccgtcgcgggtaatgtcagcgttgagaaaactacccgcaatgccctgcaactgctgcatttctggaatgcggagattccgctcgcccaaggggccgctgtgccactggtacgcgcaccgcgtgatgcggcatctgtgcacggcgaaagcggaatggctggctacgactttgttgagcacaaccgaaagccgctcgggataccggcgtttctggcgattcgggatgccctgatgcgtgcaccagagcctgttaccctggtggccatcggcccgttaaccaatattgcgctgttacttagtcaatgcccggaatgcaagccgtatattcgccgtctggtgatcatgggtggttctgccggacgcggcaactgtacgccaaacgccgagtttaatattgctgccgatccagaagctgctgcctgtgtcttccgcagtggtattgaaatcgtcatgtgcggtttggatgtcaccaatcaggcaatattaactcctgactatctctctacactgccgcagttaaaccgtaccgggaaaatgcttcacgccctgtttagccactaccgtagcggcagtatgcaaagcggcttgcgaatgcacgatctctgcgccatcgcctggctggtgcgcccggacctgttcactctcaaaccctgttttgtggcagtggaaactcagggcgaatttaccagtggcacgacggtggttgatatcgacggttgcctgggcaagccagccaatgtacaggtggcattggatctggatgtgaaaggcttccagcagtgggtggctgaggtgctggctctggcgagctaacctgtcacatgttattggcatgcagtcattcatcgactcatgcctttcactgatatccctccctgtttatcattaatttctaattatcagcgtttttggctggcggcgtagcgatgcgctggttactctgaaaacggtctatgcaaattaacaaaagagaatagctatgcatgatgcaaacatccgcgttgccatcgcgggagccggggggcgtatgggccgccagttgattcaggcggcgctggcattagagggcgtgcagttgggcgctgcgctggagcgtgaaggatcttctttactgggcagcgacgccggtgagctggccggagccgggaaaacaggcgttaccgtgcaaagcagcctcgatgcggtaaaagatgattttgatgtgtttatcgattttacccgtccggaaggtacgctgaaccatctcgctttttgtcgccagcatggcaaagggatggtgatcggcactacggggtttgacgaagccggtaaacaagcaattcgtgacgccgctgccgatattgcgattgtctttgctgccaattttagcgttggcgttaacgtcatgcttaagctgctggagaaagcagccaaagtgatgggtgactacaccgatatcgaaattattgaagcacatcatagacataaagttgatgcgccgagtggcaccgcactggcaatgggagaggcgatcgcccacgcccttgataaagatctgaaagattgcgcggtctacagtcgtgaaggccacaccggtgaacgtgtgcctggcaccattggttttgccaccgtgcgtgcaggtgacatcgttggtgaacataccgcgatgtttgccgatattggcgagcgtctggagatcacccataaggcgtccagccgtatgacatttgctaacggcgcggtaagaagcgctttgtggttgagtggtaaggaaagcggtctttttgatatgcgagatgtacttgatctcaataatttgtaaccacaaaatatttgttatggtgcaaaaataacacatttaatttattgattataaagggctttaatttttggcccttttatttttggtgttatgtttttaaattgtctataagtgccaaaaattacatgttttgtcttctgtttttgttgttttaatgtaaattttgaccatttggtccacttttttctgctcgtttttatttcatgcaatcttcttgctgcgcaagcgttttccagaacaggttagatgatctttttgtcgcttaatgcctgtaaaacatgcatgagccacaaaataatataaaaaatcccgccattaagttgacttttagcgcccatatctccagaatgccgccgtttgccagaaattcgtcggtaagcagatttgcattgatttacgtcatcattgtgaattaatatgcaaataaagtgagtgaatattctctggagggtgttttgattaagagtgcgctattggttctggaagacggaacccagtttcacggtcgggccataggggcaacaggtagcgcggttggggaagtcgttttcaatactagtatgaccggttatcaagaaatcctcactgatccttcctattctcgtcaaatcgttactcttacttatccccatattggcaatgtcggcaccaatgacgccgatgaagaatcttctcaggtacatgcacaaggtctggtgattcgcgacctgccgctgattgccagcaacttccgtaataccgaagacctctcttcttacctgaaacgccataacatcgtggcgattgccgatatcgatacccgtaagctgacgcgtttactgcgcgagaaaggcgcacagaatggctgcattatcgcgggcgataacccggatgcggcgctggcgttagaaaaagcccgcgcgttcccaggtctgaatggcatggatctggcaaaagaagtgaccaccgcagaagcctatagctggacacaagggagctggacgttgaccggtggcctgccagaagcgaaaaaagaagacgagctgccgttccacgtcgtggcttatgattttggtgccaagcgcaacatcctgcggatgctggtggatagaggctgtcgcctgaccatcgttccggcgcaaacttctgcggaagatgtgctgaaaatgaatccagacggcatcttcctctccaacggtcctggcgacccggccccgtgcgattacgccattaccgccatccagaaattcctcgaaaccgatattccggtattcggcatctgtctcggtcatcagctgctggcgctggcgagcggtgcgaagactgtcaaaatgaaatttggtcaccacggcggcaaccatccggttaaagatgtggagaaaaacgtggtaatgatcaccgcccagaaccacggttttgcggtggacgaagcaacattacctgcaaacctgcgtgtcacgcataaatccctgttcgacggtacgttacagggcattcatcgcaccgataaaccggcattcagcttccaggggcaccctgaagccagccctggtccacacgacgccgcgccgttgttcgaccactttatcgagttaattgagcagtaccgtaaaaccgctaagtaatcaggagtaaaagagccatgccaaaacgtacagatataaaaagtatcctgattctgggtgcgggcccgattgttatcggtcaggcgtgtgagtttgactactctggcgcgcaagcgtgtaaagccctgcgtgaagagggttaccgcgtcattctggtgaactccaacccggcgaccatcatgaccgacccggaaatggctgatgcaacctacatcgagccgattcactgggaagttgtacgcaagattattgaaaaagagcgcccggacgcggtgctgccaacgatgggcggtcagacggcgctgaactgcgcgctggagctggaacgtcagggcgtgttggaagagttcggtgtcaccatgattggtgccactgccgatgcgattgataaagcagaagaccgccgtcgtttcgacgtagcgatgaagaaaattggtctggaaaccgcgcgttccggtatcgcacacacgatggaagaagcgctggcggttgccgctgacgtgggcttcccgtgcattattcgcccatcctttaccatgggcggtagcggcggcggtatcgcttataaccgtgaagagtttgaagaaatttgcgcccgcggtctggatctctctccgaccaaagagttgctgattgatgagagcctgatcggctggaaagagtacgagatggaagtggtgcgtgataaaaacgacaactgcatcatcgtctgctctatcgaaaacttcgatgcgatgggcatccacaccggtgactccatcactgtcgcgccagcccaaacgctgaccgacaaagaatatcaaatcatgcgtaacgccagcatggcggtgctgcgtgaaatcggcgttgaaaccggtggttccaacgttcagtttgcggtgaacccgaaaaacggtcgtctgattgttatcgaaatgaacccacgcgtgtcccgttctagcgcgctggcgagcaaagcgaccggtttcccgattgctaaagtggcggcgaaactggcggtgggttacaccctcgacgaactgatgaacgacatcactggcggacgtactccggcctccttcgagccgtccatcgactatgtggttactaaaattcctcgcttcaacttcgaaaaattcgccggtgctaacgaccgtctgaccactcagatgaaaagcgttggcgaagtgatggcgattggtcgcacgcagcaggaatccctgcaaaaagcgctgcgcggcctggaagtcggtgcgactggattcgacccgaaagtgagcctggatgacccggaagcgttaaccaaaatccgtcgcgaactgaaagacgcaggcgcagatcgtatctggtacatcgccgatgcgttccgtgcgggcctgtctgtggacggcgtcttcaacctgaccaacattgaccgctggttcctggtacagattgaagagctggtgcgtctggaagagaaagtggcggaagtgggcatcactggcctgaacgctgacttcctgcgccagctgaaacgcaaaggctttgccgatgcgcgcttggcaaaactggcgggcgtacgcgaagcggaaatccgtaagctgcgtgaccagtatgacctgcacccggtttataagcgcgtggatacctgtgcggcagagttcgccaccgacaccgcttacatgtactccacttatgaagaagagtgcgaagcgaatccgtctaccgaccgtgaaaaaatcatggtgcttggcggcggcccgaaccgtatcggtcagggtatcgaattcgactactgttgcgtacacgccagcctggcgctgcgcgaagacggttacgaaaccattatggttaactgtaacccggaaaccgtctccaccgactacgacacttccgaccgcctctacttcgagccggtaactctggaagatgtgctggaaatcgtgcgtatcgagaagccgaaaggcgttatcgtccagtacggcggtcagaccccgctgaaactggcgcgcgcgctggaagctgctggcgtaccggttatcggcaccagcccggatgctatcgaccgtgcagaagaccgtgaacgcttccagcatgcggttgagcgtctgaaactgaaacaaccggcgaacgccaccgttaccgctattgaaatggcggtagagaaggcgaaagagattggctacccgctggtggtacgtccgtcttacgttctcggcggtcgggcgatggaaatcgtctatgacgaagctgacctgcgtcgctacttccagacggcggtcagcgtgtctaacgatgcgccagtgttgctggaccacttcctcgatgacgcggtagaagttgacgtggatgccatctgcgacggcgaaatggtgctgattggcggcatcatggagcatattgagcaggcgggcgtgcactccggtgactccgcatgttctctgccagcctacaccttaagtcaggaaattcaggatgtgatgcgccagcaggtgcagaaactggccttcgaattgcaggtgcgcggcctgatgaacgtgcagtttgcggtgaaaaacaacgaagtctacctgattgaagttaacccgcgtgcggcgcgtaccgttccgttcgtctccaaagccaccggcgtaccgctggcaaaagtggcggcgcgcgtgatggctggcaaaagcctggctgagcagggcgtaaccaaagaagttatcccgccgtactacagcgtgaaagaagtggtgctgccgttcaataaattcccgggcgttgacccgctgttagggccagaaatgcgctctaccggggaagtcatgggcgtgggccgcaccttcgctgaagcgtttgccaaagcgcagctgggcagcaactccaccatgaagaaacacggtcgtgcgctgctttccgtgcgcgaaggcgataaagaacgcgtggtggacctggcggcaaaactgctgaaacagggcttcgagctggatgcgacccacggcacggcgattgtgctgggcgaagcaggtatcaacccgcgtctggtaaacaaggtgcatgaaggccgtccgcacattcaggaccgtatcaagaatggcgaatatacctacatcatcaacaccaccagtggccgtcgtgcgattgaagactcccgcgtgattcgtcgcagtgcgctgcaatataaagtgcattacgacaccaccctgaacggcggctttgccaccgcgatggcgctgaatgccgatgcgactgaaaaagtaattagcgtgcaggaaatgcacgcacagatcaaataatagcgtgtcatggcagatatttttcatccgctaatttgatcgaataactaatacggttctctgatgaggaccgtttttttttgcccattaagtaaatcttttggggaatcgatatttttgatgacataagcaggatttagctcacacttatcgacggtgaagttgcatactatcgatatatccacaattttaatatggccttgtttaattgcttcaaaacgagtcatagccagacttttaatttgtgaaactggagttcgtatgtgtgaaggatatgttgaaaaaccactctacttgttaatcgccgaatggatgatggctgaaaatcggtgggtgatagcaagagagatctctattcatttcgatattgaacacagcaaggcggttaataccctgacttatattctgagcgaagtcacagaaataagctgcgaagttaagatgatccctaataagctggaagggcggggatgccagtgtcagcgactggttaaagtggtcgatatcgatgagcaaatttacgcgcgcctgcgcaataacagtcgggaaaaattagtcggtgtaagaaagacgccgcgtattcctgccgttccgctcacggaacttaaccgcgagcagaagtggcagatgatgttgagtaagagtatgcgtcgttaattttatctcgttgataccgggcgtcctgcttgccagatgcgatgttgtagcatcttatccagcaaccaggtcgcatccggcaagatcaccgtttaggcgtcacatccgtcgtcccctgcaaacgggggcgattttcctccatttgcctcagtggctgcgtttcatgtaagcttacatgacagcgcccgacaagatcctgatactctttggtattcaaccgtttccagtgtaactcgtcgtcactaacattgcgtacagcgcgggctggcgtacccatcaacaactggcgtttctcgccgcgaaagcccgctttgacaaagctcatggcggcaacaatgctctcttcgccaatgaccgcgccatccataatcacgctgttcatcccgaccaatgcatcgcgaccaatcaaacaaccatgcaggatcgctccgtgcccgatatggccgttttccccaacgatagtgtcagtgtcgcagtagccatgcataatgcagccatcctgaatattggctcccgcttgcacgatcaaccgcccgtagtcaccacgcagactggcgagtgggccgatgtagacaccggctcccacaatcacatcgccaatcaagacggcactgggatggacaaacgccgtcgggtgaaccaccggaattaacccctcaaaggcgtaatagctcacggttgttaacgtcctttccacaccggatcgcgcttctcggcaaacgccagcggcccttcaatggcatcttcgctatgcagaacgcttggatagtgtttcaacacgccgctgcgaatatagcgatacgcttcttctaccggcatttcgctggtggtgcggtagatctctttcagcgccgcaatcgccagcggggcgctgttaaccagctgctgagccagttcgcgggcgttatccatcagttccgcctggctaaccacgcggttgactatcccccaacgcagcgcctcttctgcgcccattcgtctgccggtcatcaccatttcattgacgatggcaggcggcaggatcttcggcagacgcagcacaccgccgctgtcaggaacgatgcccagtttggcttccggcagggcgaagctggcgttatcggcacaaacaataaaatctgccgccagcgccagttcaaagccgccgccaaaggcatagccgttcacagctgcgataaccggtttgtcgagattgaaaatttcggttaatcccgcaaaaccacccggaccaaagtcagcatccggtgcttcgccttctgctgccgcttttaaatcccagcccgcggaaaagaacttctctccggcaccggtaataatggcgacacgtaattgcggatcgtcacggaaatttagaaatacttcgcccatttcaaagctggtttttgcatcaatagcattcgcttttggacgatcaagggtaatttccagaatacttccattgcgggtcagatgtaaactttcactcattccttttctccatttttgctttttcagggagctcaacatccctgcaaaaaatgcatattgttttagagtgtgattattagctggcagggtagttccctgctgtttcatttatttcagattctttctaattattttcccgctgcaattacgtggcagatcttttctgatctccagataagagggcactttaaatttcgccatattttgttcgcagaagcggaaaaattcctcttcgctcaatgtttcaccttcattcagcaccacaaatgctttgatggcttcatcgcgaatgctatctttaatacccacaaccacgatgtcctgaattttcgggtgcgcggcgataatattttccagctccacgcaggagacattctcgccgccacgtttaatcatattgcagcggcgatcgacgaaataaaaaaagtcctcttcgtcgcggtatccggtatcgccggtatgcagccagccatcggcttccagcactttcgcagtggcttgtgggttgagaaagtactctttgaagatggttttcccaggtatgcctttaatgcagatttcaccgatctcaccagccgggagcgggcgattgtgatcgtcgcggatctccgcttcgtagcaaaaccccacccgaccaatgctcggccagcgtcgtttatcgccaggacgatcgccgataatgcccacaatggtttccgtcatcccataagacgtcagcaagcgaacgccgaagcgttcacaaaacgcatctttttcctgctcgctcaagttgagataaaacatcacttcccgcaggcggtgttgctgatcgttcgcactaggcggctgtaccatcaacgtacggatcatcatcggaatacattcggtaacggtggcgcggtacttctgtacctgtccccagaaggcgcgggcgctgtatttctcgaccagcacaaaggtggccccggcagaaaacgccgccatcgccgcagtacactggcaatcgatatgaaacgcaggcattaccgtcaggtagacgtcatcgtcacgcagtgcacactgccaggcggagtaatatccagcgaagcgcaggttgtaatgggtaatcaccacacctttcggtcgggaggtggtgccggaggtgaagagaatttccgccgtatcgtcagtgcttagcggcggtgcatagcacaaggtggcaggttgttgatttttcagttgagtaaagctactcacgccatcatcagcgggaagtgccacatctgtcaggcaaatgtgccgcaattgagtggcatcttcctgctgaatctgttgatacataggatagaattgcgcactggtcaccagcaggcacgcctggctattttgcaggatccacgcgctttcctcgcacaacaggcgggcgttaatcggcaccataatcgcgccaatttttgccagcccgaaccagcaaaagataaattccgggcagttgtcgagatgtagtgcaaccttgtcgcctttgcgaatccccagcgtataaaacaggtttgccgtgcggttaatctcctgatttaactcaagataactataccggttaacgactccgccgctggattcacaaatcagcgccgttttatgaccgtaaacgtccgcaagatcgtcccacatttgacgtagatgttgtccgccaatgatatccattgcacctctatccatttttgttcgtttgttattgggcgggcgctagtcaggcaagccgactgacgccacgcgtttagtcctcaactttggccagacctttgctgaccaactcctgaatgtcgttttcgctgtagccgatatttttcaaaatggcagccgtgtccataccatgactgggcattccgcgccagatttgtccggggttatttttgaatttcggcatgatgttcggccctttgcaggtgcgaccatccatcgtttgccactgagtgatactttcgcgagccacatactgtggattgctttccagttccggtacggtcagcactttggcgcaggcgatattcagttcagcaaagcgttcttttacttccgcgatggtatgtgtcgccagccaggcatcgagtttctcttcaaccagtgggccgtaagggcattcgatacggtggataagctgagtgccttccgggatttctggcgtgccaagcagatgtgcgaggccaatatctttaaagcactcttcaatttgggtaatgcccaccagttccatcacgatgtagccgtcggcacatttatacagaccgcaaccggcgtagtagggatctttacctttgctcatgcgcgggcacatttcgccgccgttgaagtaatccatcatgaagtactggcccatacgcagcatcacttcatacatggcgatgtcgatactttcgcctttaccggtttcacgcactttatgcagtgctgccagcgccgccgtggtggcggtcaggccagaaaagtaatcggcggtatacgggaaggcaggcattggctggtcaacatcaccgttctgaatcaggtaaccactaaaggcctgggcgatagtgttataggccggaagattggtgtactcctcggtgccgtactgaccaaaaccggacaggtgagcgataaccagtttcgggttgtgctgccacagtacttcatcggtaatgccacgacgggcaaaggccggacctttactggcttcgatgaagatatcggtggtttccattaatttcagaaacgcttcgcggccttcatctttgaaaatatttaagctcagcgcgtgcaaattgcggcgggagagttgcgggtagttcggttgaacgcgaatggtgtcggcccaggcgacgttctcgatccagataacttccgcgccccattctgcgaacatttgcccggcaaacggtccggcgatttcgataccggagaagacaacgcgcaatccggccaacggcccgaatttcggcatgggtagatgatccattatttgctcctgaaaaatttatgtagcgcatgactgccggatgcggcgtaaacgctttatccggcctacattcgtgctcccgtaggcctgataagacgcatcagcgtcgcatcaggcagcgcacggacttagcggtattgcttcagcaccgcacgacccagcgtcaggatctgcatttcgtcagatcccccggagacgcggtctacacgcagatcacgccagaagcggctgatgcggtggttgcccgcaatcccgacaccgcccagcacctgcattgcgctatccacaacttcaaatgccgcattggcgcagaagtatttgcacatcgctgcatcgccagaggtgatggtgccgttgtctgctttccacgctgcttcatacagcatgtttttcatggagtttaatttgatcgccatgtgggcgaatttttcctgaatcaactggaaacgaccaatagcctcgccaaactgcacgcgctgattggcgtagcgcgccgcatcttcaaaggcgcacatcgccgtaccgtagttggtgagggctaccaggaaacgttcatggtcgaactcttctttgacgcggttaaagccgttaccttcccgaccgaacatgtctttctcgtccagttccacgtcgtcaaaggtgatttcacagcagctatccatacgcagaccgagcttttcaagtttggtcactttgatgcccggtttgctcatatcaacaaaccattcggtgtagacaggtttgtccggagaagccccgtcgcgcgccatcaccacgatgtacggggtgtaggcgctgctggtaataaaacacttactaccattaagataaatcttaccatttctacgggtataagtcgttttcaggctacccacgtcggagcccgcgcccggttcggtaatcgcactgttccacatctgcttaccggtgccgcggaaagccataattttgtcgatctgctcttgtgtgccttcgcgcaggaaggtgttgaacccgcccggcaactggtacagcacataggttggtgcccccagacgtcccagctccatccacacggcggcgagagtaacaaaccccgcgtccagaccaccgtgctcttcagggatcagcagactgtcgatacccatatccgccagtgctttgacaaaacgttccgggtagacgctgtcacggtcgcactcggcaaaataggcctcccagttttcgctggccatcagttcgcggataccggcgacaaacagttcctgctcatcatttaaattaaaatccatctttcaacctcttgatattttgggggttaattaatctttccagttctgtttcgcgtctttaataaaggagagcgtcaccataatgttgacgaagaacagcgggcatcctccggcgataatggcggtttgaatcggtttcaggccgccgagcgccagcagaacaataccgataatgccaaccagaatactccaaccgatacgcaccagcagaggtggttcttcaccatcgcgtacttcgcggcaagtggacatcgccagggtataagagcaggcgttaaccagcgtaacggtggcaataaagcagaggatgaagaagccccacatggtggcggtgctgagtggcagagcggcccaggtttcaatgatggcgcgcgccacaccgtactgttcgatcagatttggaatgttgatgatgtttttatctatcaacagcagagtgttactaccgagtacagtccacaggatccaggtactcgctgtcagccccagcaccatgccgaagcacagttcacgcacagtacgaccacgggagatgcgggcgaggaagatactcatctggatagcataaatcacccaccatgcccagtagaacacggtccagccctgcgggaagccgcctttagcgatgggatcggtatagaacaacatgcgcggcagatacatcagcaacatccccacgctatcggtgaagtagttcatgatgaagctggcaccgctgacaatgaacacccaacccagcatcaggaagctcaggtaactacgcacgtcactggcgatacgtacccctttttgcagaccgcaagcgacgcaaatggcgttgaggataatccagcaggtaatgatgatagcgtccagttgcagggtatgcggaatgccaaacaaccattgcatacactcggtcaccagcggcgtggcaaggcccagactggtacccatcgcgaagatcaaggcgacgagatagaagttgtcgacgatagtgccgaacaaccctttggcgtgtttttcacctaccagcggcaccagtgtgctgctggggcgaatcacttccattttgcggacaaagaagaagtaagcgaaggcgacactaaggaagctgtaagtggcccacggcagaggtccccagtggaacaagctgtaagccagccccaactctttcgcccctgtgctgttcggttctaagccaaacggcggggtggagatgtagtagtagatctcaatgcttccccagaacagtacggcagcagacgtacaggaggcgaacatcataaagatccaactggcggtgctaaattctggcggttcgttacctaaacgctttttggcatacgggccaaacaccagccagaaccaaccgaaaagcatcaccaccatataccattcaaatgcccatccccatacattggtgacgtaactgaatacagcattaataacgacattcgctgcatccagatctctgactgtaagccaacaaagtatgccgacgattattaacggcggaaagaaaaccttcggttctattcccgtttttctcttttcattcttcatgagttaattccactgtgaaaacgaatatttattttgcgttcccgtttgttttatttttgttaacatttaatataattattattaacctcgtggacgcgttaatggctaactcataatgggtattcaataagctgtattctgtgattggtatcacatttttgtttcgggtgaatagagggcgttttttcgttaattttgattaataatcagtttgttatgctctgttgtgagtaaaaaataacatctgactttcaatattggtgatccataaaacaatattgaaaatttctttttgctacgccgtgttttcaatattggtgaggaacttaacaatattgaaagttggatttatctgcgtgtgacattttcaatattggtgattaaagttttatttcaaaattaaagggcgtgatatctgtaattaacaccaccgatatgaacgacgtttccttcatgatttctggagatgcaatgaagattattacttgctataagtgcgtgcctgatgaacaggatattgcggtcaataatgctgatggtagtttagacttcagcaaagccgatgccaaaataagccaatacgatctcaacgctattgaagcggcttgccagctaaagcaacaggcagcagaggcgcaggtgacagccttaagtgtgggcggtaaagccctgaccaacgccaaagggcgtaaagatgtgctaagccgcggcccggatgaactgattgtggtgattgatgaccagttcgagcaggcactgccgcaacaaacggcgagcgcactggctgcagccgcccagaaagcaggctttgatctgatcctctgtggcgatggttcttccgacctttatgcccagcaggttggtctgctggtgggcgaaatcctcaatattccggcagttaacggcgtcagcaaaattatctccctgacggcagataccctcaccgttgagcgcgaactggaagatgaaaccgaaaccttaagcattccgctgcctgcggttgttgctgtttccactgatatcaactccccacaaattcctagcatgaaagccattctcggcgcggcgaaaaagcccgtccaggtatggagcgcggcggatattggttttaacgcagaggcagcctggagtgaacaacaggttgccgcgccgaaacagcgcgaacgtcagcgcatcgtgattgaaggcgacggcgaagaacagatcgccgcatttgctgaaaatcttcgcaaagtcatttaattacaggggatgctatgaacacgttttctcaagtctgggtattcagcgataccccttctcgtctgccggaactgatgaacggtgcgcaggctttagctaatcaaatcaacacctttgtcctcaatgatgccgacggcgcacaggcaatccagctcggcgctaatcatgtctggaaattaaacggcaaaccggacgatcggatgatcgaagattacgccggtgtcatggctgacactattcgccagcacggcgcagacggcctggtgctgctgccaaacacccgtcgcggcaaattactggcggcaaaactgggttatcgccttaaagcggcggtgtctaacgatgccagcaccgtcagcgtacaggacggtaaagcgacagtgaaacacatggtttacggtggtctggcgattggcgaagaacgcattgccacgccgtatgcggtactgaccatcagcagcggcacgttcgatgcggctcagccagacgcgagtcgcactggcgaaacgcacaccgtggagtggcaggctccggctgtggcgattacccgcacggcaacccaggcgcgccagagcaacagcgtcgatctcgacaaagcccgtctggtggtcagcgtcggtcgcggtattggcagcaaagagaacattgcgctggcagaacagctttgcaaggcgataggtgcggagttggcctgttctcgtccggtggcggaaaacgaaaaatggatggagcacgaacgctatgtcggtatctccaacctgatgctgaaacctgaactgtacctggcggtggggatctccgggcagatccagcacatggttggcgctaacgcgagccaaaccattttcgccatcaataaagataaaaatgcgccgatcttccagtacgcggattacggcattgttggcgacgccgtgaagatccttccggcgctgaccgcagctttagcgcgttgatccactctggcagggctgcattttggccctgccgctgacagggagctcttatgtccgaagatatctttgacgccatcatcgtcggtgcagggcttgccggtagcgttgccgcactggtgctcgcccgcgaaggtgcgcaagtgttagttatcgagcgtggcaattccgcaggtgccaagaacgtcaccggcgggcgtctctatgcccacagtctggaacacattattcctggtttcgccgactccgcccccgtagaacgcctgatcacccatgaaaaactcgcgtttatgacggaaaagagtgcgatgactatggactactgcaatggtgacgaaaccagcccatcccagcgttcttactccgttttgcgcagtaaatttgatgcctggctgatggagcaggccgaagaagcgggcgcgcagttaattaccgggatccgcgtcgataacctcgtacagcgcgatggcaaagtcgtcggtgtagaagccgatggcgatgtgattgaagcgaaaacggtgatccttgctgatggggtgaactccatccttgccgaaaaattggggatggcaaaacgcgtcaaaccgacggatgtggcggttggcgtgaaggaactgatcgagttaccgaagagcgttattgaagaccgttttcagttgcagggtaatcagggggcggcttgcctgtttgcgggaagtcccaccgatggcctgatgggcggcggcttcctttataccaatgaaaacaccctgagcctggggctggtttgtggtttgcatcatctgcatgacgcgaaaaaaagcgtgccgcaaatgctggaagatttcaaacagcatccggccgttgcaccgctgatcgcgggcggcaagctggtggaatattccgctcacgtagtgccggaagcaggcatcaacatgctgccggagttggttggtgacggcgtattgattgccggtgatgccgccggaatgtgtatgaacctcggttttaccattcgcggtatggatctggcgattgccgccggggaagccgcagcaaaaaccgtgcttagtgcgatgaaaagcgacgatttcagtaagcaaaaactggcggaatatcgtcagcatcttgagagtggtccgctgcgcgatatgcgtatgtaccagaaactaccggcgttccttgataacccacgcatgtttagcggctacccggagctggcggtgggtgtggcgcgtgacctgttcaccattgatggcagcgcgccggaactgatgcgcaagaaaatcctccgccacggcaagaaagtgggcttcatcaatctaatcaaggatggcatgaaaggagtgaccgttttatgacttctcccgtcaatgtggacgtcaaactgggcgtcaataaattcaatgtcgatgaagagcatccgcacattgttgtgaaggccgatgctgataaacaggcgctggagctgctggtgaaagcgtgccccgcaggtctgtacaagaagcaggatgacggcagtgtgcgcttcgattacgccggatgtctggagtgcggcacctgtcgcattctggggctggggagcgcgctggaacagtgggaatacccgcgcggcacctttggtgtggagttccgttacggctgatgttggtttgatacgtaacgccgcactgactctcattgcaaaaaacaggaataaccatgcaaccgtccagaaactttgacgatctcaaattctcctctattcaccgccgcattttgctgtggggaagcggtggtccgtttctggatggttatgtactggtaatgattggcgtggcgctggagcaactgacgccggcgctgaaactggacgctgactggattggcttgctgggcgcgggaacgctcgccgggctgttcgttggcacaagcctgtttggttatatttccgataaagtcggacggcgcaaaatgttcctcattgatatcatcgccatcggcgtgataagcgtggcgacgatgtttgttagttcccccgtcgaactgttggtgatgcgggtacttatcggcattgtcatcggtgcagattatcccatcgccaccagtatgatcaccgagttctccagtacccgtcagcgggcgttttccatcagctttattgccgcgatgtggtatgtcggcgcgacctgtgccgatctggtcggctactggctttatgatgtggaaggcggctggcgctggatgctgggtagcgcggcgatcccctgtttgttgattttgattggtcgattcgaactgcctgaatctccccgctggttattacgcaaagggcgagtaaaagagtgcgaagagatgatgatcaaactgtttggcgaaccggtggctttcgatgaagagcagccgcagcaaacccgttttcgcgatctgtttaatcgccgccattttccttttgttctgtttgttgccgccatctggacctgccaggtgatcccaatgttcgccatttacacctttggcccgcaaatcgttggtttgttgggattgggggttggcaaaaacgcggcactagggaatgtggtgattagcctgttctttatgctcggctgtattccgccgatgctgtggttaaacactgccggacggcgtccattgttgattggcagctttgccatgatgacgctggcgctggcggttttggggctaatcccggatatggggatctggctggtagtgatggcctttgcggtgtatgcctttttctctggcgggccgggtaatttgcagtggctctatcctaatgaactcttcccgacagatatccgcgcctctgccgtgggcgtgattatgtccttaagtcgtattggcaccattgttagcacctgggcactaccgatctttatcaataattacggtatcagtaacacgatgctaatgggggcgggtatcagcctgtttggcttgttgatttccgtagcgtttgccccggagactcgagggatgagtctggcgcagaccagcaatatgacgatccgcgggcagagaatggggtaaattgttcagatttctctcttttctgaatcaatattattgactataagccgcgtgaatatatgactacactttgtgggaaaacaaaggcgtaatcacgcgggctacctatgattcttataatttatgcgcatccgtatccgcatcattcccatgcgaataaacggatgcttgaacaggcaaggacgctggaaggcgtcgaaattcgctctctttatcaactctatcctgacttcaatatcgatattgccgccgagcaggaggcgctgtctcgcgccgatctgatcgtctggcagcatccgatgcagtggtacagcattcctccgctcctcaaactttggatcgataaagttttctcccacggctgggcttacggtcatggcggcacggcgctgcatggcaaacatttgctgtgggcggtgacgaccggcggcggggaaagccattttgaaattggtgcgcatccgggctttgatgtgctgagccagccgctacaggcgacggcaatctactgcgggctgaactggctgccaccgtttgccatgcactgcacctttatttgtgacgacgaaaccctcgaagggcaggcgcgtcactataagcaacgtctgctggaatggcaggaggcccatcatggataattaaggaatggcaggaggcccatcatggatagccatacgctgattcaggcgctgatttatctcggtagcgcagcgctgattgtacccattgcggtacgtcttggtctgggaagcgtacttggctacctgatcgccggctgcattattggcccgtgggggctgcgactggtgaccgatgccgaatctattctgcactttgccgagattggggtggtgctgatgctgtttattatcggcctcgaactcgatccacaaaggctgtggaagctgcgtgcggcagtgttcggctgtggcgcattgcagatggtgatttgcggcggcctgctggggctgttctgcatgttacttgggctgcgctggcaggtcgcggaattgatcggcatgacgctggcgctctcctctacggcgattgccatgcaggcgatgaatgaacgcaatctgatggtgacgcaaatgggtcgcagtgcctttgcggtgctgctgttccaggatatcgcggcgatcccgctggtggcgatgattccgctactggcaacgagcagtgccagcacgacgatgggcgcatttgctctcagcgcgttaaaagtggcgggtgcgctggtgctggtggtattgctggggcgctatgtcacgcgtccggcgctgcgttttgtagcccgctctggcttgcgggaagtgtttagtgccgtggcgttattcctcgtgtttggctttggtttgctgctggaagaggtcggcttgagcatggcgatgggcgcgtttctggcgggcgtactgctggcaagcagcgaataccgtcatgcgctggagagcgatatcgaaccatttaaaggtttgctgttggggctgtttttcatcggtgttggcatgagcatagactttggcacgctgcttgaaaacccattgcgcattgtcattttgctgctcggtttcctcatcatcaaaatcgccatgctgtggctgattgcccgaccgttgcaagtgccaaataaacagcgtcgttggtttgcggtgttgttagggcagggcagtgagtttgcctttgtggtatttggcgcggcgcagatggcgaatgtgctggagccggagtgggcgaaaagcctgaccctggcggtggcgctgagcatggcagcaacgccgattctgctggtgatcctcaatcgccttgagcaatcttctactgaggaagcgcgtgaagccgatgagatcgacgaagaacagccgcgcgtgattatcgccggattcggtcgttttgggcagattaccggacgtttactgctctccagcggggtgaaaatggtggtactcgatcacgatccggaccatatcgaaaccttgcgtaaatttggtatgaaagtgttttatggcgatgccacgcggatggatttactggaatctgccggagcggcgaaagcggaagtgctgattaacgccatcgacgatccgcaaaccaacctgcaactgacagagatggtgaaagaacatttcccgcatttgcagattattgcccgcgcccgcgatgtcgaccactacattcgtttgcgtcaggcaggcgttgaaaagccggagcgtgaaaccttcgaaggtgcgctgaaaaccgggcgtctggcactggaaagtttaggtctggggccgtatgaagcgcgagaacgtgccgatgtgttccgccgctttaatattcagatggtggaagagatggcaatggttgagaacgacaccaaagcccgcgcggcggtctataaacgcaccagcgcgatgttaagtgagatcattaccgaggaccgcgaacatctgagtttaattcaacgacatggctggcagggaaccgaagaaggtaaacataccggcaacatggcggatgaaccggaaacgaaacccagttcctaataaagagtgacgtaaatcacactttacagctaactgtttgtttttgtttcattgtaatgcggcgagtccagggagagagcgtggactcgccagcagaatataaaattttcctcaacatcatcctcgcaccagtcgacgacggtttacgctttacgtatagtggcgacaattttttttatcgggaaatctcaatgatcagtctgattgcggcgttagcggtagatcgcgttatcggcatggaaaacgccatgccgtggaacctgcctgccgatctcgcctggtttaaacgcaacaccttaaataaacccgtgattatgggccgccatacctgggaaagtatcggtcgtccgttgccaggacgcaaaaatattatcctcagcagtcaaccgggtacggacgatcgcgtaacgtgggtgaagagcgtggatgaagccatcgcggcgtgtggtgacgtaccagaaatcatggtgattggcggcggtcgcgtttatgaacagttcttgccaaaagcgcaaaaactgtatctgacgcatatcgacgcagaagtggaaggcgacacccatttcccggattacgagccggatgactgggaaagcgtattcagcgaattccacgatgctgatgcgcagaactctcacagctattgctttgagattctggagcggcggtaattttgtatagaatttacggctagcgccggatgcgacgccggtcgcgtcttatccggccttcctatatcaggctgtgtttaagacgccgccgcttcgcccaaatccttatgccggttgctcggctggacaaaatactgtttatcttcccagcgcaggcaggttaatgtaccaccccagcagcagccggtatccagcgcgtatataccttccggcgtacctttgccctccaggcttgcccagtgaccaaaggcgatgctgtattcttcagcgacagggccaggaatcgcaaaccacggtttcagtggggcaggggcctcttccgggctttctttgctgtacatatccagttgaccgttcgggaagcaaaaacgcatacgggtaaaagcgttggtgataaaacgcagtcttcccagcccccgcaattccggactccagttatttggcatatcgccgtacatggcatcaagaaagaagggataggagtcactgcttagcaccgcttctacatcgcgtgcgcactctttggcggtctgcagatcccactgcggcgtgatccctgcgtgggccatcaccagctttttctcttcgtcgatttgcagcagaggctggcgccgcagccagttaagcagctcgtcggcatccggcgcttccagcagcggtgtcaggcgatctttcggtttattgcggctgatcccggcaaataccgccagcagatgcagatcgtgattgcccagcaccagacgtacgctgtcgcctaaggatttcacatagcgcagaacatccaggctacccggcccgcgcgcgaccagatcgcccgtcagccagagggtatctttcccaggggtaaattctactttatgcagcaatgcgatcagttcatcgtaacaaccatgaacgtcgccaataaggtatgtcgccatattcttttaatgaatgagtgtgggaacggcgagtcggaatacgggaatgtcgatgctgaaagggacgccattttcatcgatcatttcgtagtgaccctgcatggtgcccagcggggtttcaatgattgcaccgctggtgtactggtactcttcgccaggcgcgataagtggctggacgccaaccactccttcgccctggacttcggtttcacggccattgccattggtgatcagccagtaacgccccaacaactgcactggcgctcgccccagattgcgtatggttacggtataagcaaaaacgtaacgttcattatcaggactagattgagcctcaatgtagacgctttgaacctgaatacacactcgggggctattgatcatcgttaactctcctgcaaaggcgcgttctccgccagatagttcgccatctggcaatattgcgcgacagagatattttccgctcgcatcgccgggtcgatccccattcccgttaacacctcgacgctaaacaggttgccgaggctgttacgaatggttttacgacgctggttaaaggcttcggtggtgatgcggctcaacacacgaacatctttaaccgggtgaggcatcgttgcatgaggaaccaggcgcacgacggcggaatccactttgggtggtggtgtaaaggcactcggcggtacttccagtaccgggatcacattgcaatagtattgcgccatgacgcttaatcgaccatacgctttgctgttcggtcctgcaaccagacgattcaccacctctttttgcaacataaagtgcatgtcggcaatggcatcagtatagctaaacagatggaacatcaacggcgtggagatgttataaggcaggttgccgaaaacacgcagcggctgacccattttctcggccagttcaccaaagttaaaggtcatcgcatcctgctgataaatcgtcagtttcgggcctaagaatggatgcgtttgcagacgtgccgccagatcgcggtcaagttcgatgaccgtcagctggtccagacgttcgccgaccggttcggtcaatgccgccagaccggggccgatttcgaccatcgcctggcccttttgcgggttaatggcagacacaatactgtcgatcacgaactgatcgttgagaaagttttgcccgaagcgtttacgggctaagtggccctggtggactcgattattcattgggtgttaacaatcattttgatggcgagattaagcgccgtaataaaactgccggcatcggctttgccacgtcccgccagttcaagcgcggtgccgtggtccacacttgtgcgaataaagggcaggcccagcgtaatgttcacaccgcgcccgaagccctggtattttagcacgggaagaccctgatcgtggtacatcgccagcacggcgtcggcgttatcaagatatttcggctgaaacagggtatcggcaggcagcggcccgttgagtttcatcccctgcgcccgcagctcattgagcaccggaataatggtgtctatctcttccgtacccatatgaccgccttcgcccgcgtgcggattcagcccgcagaccagaatgcgcggttcggcaataccaaatttggtccgcaaatcgtgatgcaaaatagcaatcacttcgtgcaaaagtgcaggggtgatagcgtctgcgatatcgcgcagcggtaaatgcgtcgttgccagcgccacgcgaagttcttcggtcgccagcatcatcaccacctttttcgcctggctacgctcttcgaaaaactcggtatgaccggtaaaaggaatgccagcgtcgttaataacgcctttatgcaccggacctgtgatcagcgcggcaaattcgccgttcagacaaccatcgcacgctcgcgccagcgtttccaccacataatgcccattttcaaccgctaactgccccgcagtgacaggtgcacgtagcgcgacaggaagtagcgttaatgtgcccgcagtttgcggttgtgcaggggagttgggggaataagggcggagggtgagcggcaaaccgagcatcgctgcccggttggtaaggagagtggcatcggcacaaacaaccagttcgaccggccactcacgctgtgcaagctggacaactaagtccgggccaatcccggcgggctcgccgggagtgatcacaacacgttgggttttaaccattagttgctcaggattttaacgtaggcgctggcacgttgttcctgcatccagcttgctgcttcttcgctgaacttacggttcatcagcatgcggtatgcacgatctttctgcgcagcgtcggttttatcgacattacgggtatccagcagttcgattaaatgccagccgaaactagagtgaaccggtgcactcatttgacctttgttcaggcgagtcagggcgtcacggaaggccggatcgaaaatatctggtgtagcccagccgagatcgccgccctggttagcagagcctggatcctgagagaactctttcgctgcggcagcaaaagtcgttttaccactcttgatatcagcagcaatctgttccagtttcacacgggcctgttcgtcagtcatgatcgggctcggtttcagcagaatatggcgagcatgaacttcggtcacgctgatatttttgctttcgccgcgcaggtcgttaactttcagaatatggaagccaacgccggaacgaatcgggccaacaatgtcgcctttcttcgcggtgcttaatgcctgggcgaagatcccgggcaactcctgaatacggccccagcccatctggccgccgttcagcgcctgctggtcggcagaatgagcaatcgccagcttaccgaaatcagcgccgttacgcgcctgatcgacaatggcgcgcgcctggctttccgcttcgttcacctgatcagaggtcgggttttccggcagcgggatcaggatgtggctcaggttcagctcagtgctggcgtcgttttggttacccacctgctgcgccagggattcgacttcctgcggcaggatggtgatgcgacgacgcacctcgttgttacgcacttcagagataatcatctctttgcggatctggttacgataggtgttgtagttcagtccatcgtaagccagacggctgcgcatctgatccagcgtcatgttgttctgtttcgcgatgttagcaatcgcctgatccagctgctcatcggagattttcactcccattttctgccccatctgcaggatgatttgatccatgatcaaacgttccatgatttggtggcgcagcgtcgcgtcatcaggaagttgctgccttgcctgagcagcgttcagttttacgctctgcattaatccatcaacgtcgctttccagcacgacgccgttattgacgacggctgcgactttatcgactacctggggggcagcgaaactggtattcgcgatcatggcgataccgagaagcagcgttttccagttcttcatactttttccatttcaattaaccgcactgcggattacgtggtaaatcaacaaatcacaaagtgttttgatacggcagaatgttgctacgcagcatctcttgcgtacccagaccgtagttggagctcaggccgcgaagttcgatgttaaagccgattgcgttgtcatataccgcatgttgtttatcgttatcccaaccgttcagcttccgctcgtaaccgacgcgaattgcatagcagcaggagctgtattgcacacctaacatagagtcggcttgcttgttagcattggtgtcgtagtagtaggccccaacaatggaccaacgatcggcaattggccagctggcgacagcacctacctggctaataccattcttatattgctcagcagtggaatagtacttaggcagcgtagcctgaatatattccgggctggcgtaacggtaattcagctgtaccagacggtcttcatcccgacggtattcaatgctggagttactggtcgctacgttatccagacgtgtatcgtactgaatcccgccacgcaatccccaacgctcggagatacgccagtaagtatcgcctgcccacaccagactacccgttttgtcgtcattctcccatgttatgttgtcatcgccagtgcgagactccgtgaaatagtagatttgaccaacggaaatattaaaacgttcaacggcagcatcatcatatatgcgagatgtgacaccggtcgtcacctggttagcggaggcaatacggtcaagaccgccgtaagtccggtcccggaacaggccagagtagtcagattgcagcagagagctgtcgtagttatagatgtcgctctgatcgcgatacggcacgtacaaatactgcgcgcgcggttccagcgtttgggtataacccggagccagcatttccatatcgcgttcaaagaccattttgccgtcaactttgaattgcggcattacgcggttaacggattcgtccagcttggtcgtgtttctggagttataccagtcaagattggtttgctgataatgggttgccagcaacttcgcttcggtattgatgctgccccagttattagagagcggcaaattgatggtcggttccaggtgaacacgggttgcttcaggcatgtcgtctctggtgttaacaaagtgcactgcctggccgtaaatacgcgtatcaaacggaccaacatcattctggtagtaattaacgtctaactgcggctctgcgctgtagctactggtgttctgttcgctgaaaacctggaactgcttggtactaacggtggcattgaagttttgcaccgcatagccaacgctgaatttttgcgttgcgtagccgtcagtactggaaccgtacttgttatcgaaatcattgaagtagctaggatcgctgaccttggtgtagtcgacgttgaaacgccacacctgatccatgaccccggagtggttccagtagaataaccaacgacgactactgtcatcgttcgggtgttcatcttcatagactttatcactaggcagatagtccagttccatcaagccagcgcccgcctgggagaggtagcggaattcgttctcccacatgatgttgccacgacgatgcatataatgcggcgtgatggtggcatccatatttggcgcgatgttccagtaatatggcaggtagaactcaaagtagttggtggtggtgtacttggcgttcgggatcaagaaaccagagcgacgtttgtcacccaccggcaactgcaaataggggctataaaagatcggtaccggacccaccttaaagcgggcgttccagatctccgcaacttgttcttcgcggtcatgaataatttcgctacctaccacgctccaggtgtcagaacccggcagacaggaggtaaagctaccgttatccagaatggtatagcggttttcgccacgttgtttcatcaggtccgctttaccgcgaccctggcgacccaccatctggtaatcaccttcccagacgttggtatctttggtgttcagattcgcccagcctttcggccctttgaggatcacctggttatcgtcgtaatggacattaccgagcgcatcaacggtacgtaccggctccggttgtcctggtgcctctttttgatggagctgcacttcgtcggcctgcagacggctgttaccctgcatgatatccacgctgccagtaaacacggcgtcatccgggtagtcccctttcgcgtggtcagcattgatagtcacgggtaagtcattggtatcgccctgtaccagaggacggtcatagcttggcacgcccaacatgcactgactggcgaggtcggctgccagtccctgttgactataaagggcggtggcaatcatggtggccaggagagtggggatacgttttttcatacgttgattttattgttccatcatcggtaacgttgcgcgtgacaaacggtcagagactaacgtactcgtcatctctacgctagtgttaatcctgtccgaatagcgtcagtggtgttaggcacggcattgaatgacaggtatgataatgcaaattataggcgatgtcccacaattgaccgcagccggaaaacggtaaaagcacctttatattgtgggagatagccctgatatccgtgtgtcgatttggggaatatatgcagtattggggaaaaatcattggcgtggccgtggccttactgatgggcggcggcttttggggcgtagtgttaggcctgttaattggccatatgtttgataaagcccgtagccgtaaaatggcgtggttcgccaaccagcgtgagcgtcaggcgctgttttttgccaccacttttgaagtgatggggcatttaaccaaatccaaaggtcgcgtcacggaggctgatattcatatcgccagccagttgatggaccgaatgaatcttcatggcgcttcccgtactgcggcgcaaaatgcgttccgggtgggaaaaagtgacaattacccgctgcgcgaaaagatgcgccagtttcgcagtgtctgctttggtcgttttgacttaattcgtatgtttctggagatccagattcaggcggcgtttgctgatggtagtctgcacccgaatgaacgggcggtgctgtatgtcattgcagaagaattagggatctcccgcgctcagtttgaccagtttttgcgcatgatgcagggcggtgcacagtttggcggcggttatcagcagcaaactggcggtggtaactggcagcaagcgcagcgtggcccaacgctggaagatgcctgtaatgtgctgggcgtgaagccgacggatgatgcgaccaccatcaaacgtgcctaccgtaagctgatgagtgaacaccatcccgataagctggtggcgaaaggtttgccgcctgagatgatggagatggcgaagcagaaagcgcaggaaattcagcaggcatatgagctgataaagcagcagaaagggtttaaatgaccctgtaaatgatgctgagtaactgcccacgattaaaggtggccgccctggcggtcacttctttgagaaaaggcgtttactcagaatggtggacaggctcaatgcacgatttacgggaggggttctgtaggttttatcgcgttgaccctgcttaaggttgagagctttacgacgagcggaattatatttttacgtcttaaaaataaaaaacacatacctgaatgagcgatttttgaaagtatatttattcagaacgcgcatcatgagtttttaactcaatgcgaggctattaccatgaaagtaagtgttccaggcatgccggttacacttttaaatatgagcaagaacgatatttataagatggtgagcggggacaagatggacgtgaagatgaatatctttcaacgcttgtgggagacgttacgccatctgttctggagtgataaacagactgaggcttataaacttctgttcaatttcgtgaataaccagactggcaacatcaacgccagtgaatactttactggggctatcaacgagaatgagagagaaaagtttatcaatagcctggaattattcaataaacttaaaacatgcgcaaaaaatccggatgagttggtcgcaaagggcaatatgcgctgggtcgcccagaccttcggggatatcgagttaagtgtcacttttttcattgaaaagaataagatatgtactcagacgttgcagctgcataagggccaaggtaacttgggcgttgatcttagaaaggcttaccttcccggcgttgacatgagggattgttaccttggtaaaaaaacaatgaaaggtagcaatgatatcctttatgagagacctgggtggaatgctaacctgggcgtgctaccccggacggtgctaccccggacggtgctaacccggacggtgctaacctggacggtgctaccgtgaacggtgctacctccttatatgatgaggtaattattattaataaaatcccccccaaaaaaattgatactaaaggagttgctactgaagaagttgctactaaaaaagtactgctgaacaaattactgacaacgcaattattgaatgagccagaataagctaaggttgaaggggctggaacgccccttcaaccttagcagtagcgtgggatgatttcacaattagaaagacctgcatgatgagctagagaagaggctagtgacgcaaggcgtcgtgcaggacacggatcaccgagatgggcatcgccaaccagactgctaattagcccatgaataacaatcagaaaggaccataacagacccgttaaaatgaaatataagagacggtcaacgggtgaagaaaaagttcaaaaattcgctgtggagcaggaagggaattaccgaatggaaagcgtagccacacgcaacaactgaaagcagtttggcagaaacaaaaaatccccggactcggggatttatgtacaagaggcagcccttaggatgagggtataaacgtacaggaaaggttaaaaatccgctggcgctttaaacgtcatactattgccatacgccggatgggtaatcgtcaacatctctgcatgtagcaacaaacgtggtgccatcgctctcgcttctggacttgcataaaaacgatcgccgagaatcggatgacccagcgccagcatatgcacacgcaattgatggctacgcccggtaatcggttttaacaccactcttgccgtgttatccgccgcatactccaccacttcatattccgtctgcgcaggtttacccgtttcgtaacagactttctgtttcgggcggtttggccagtcgcaaatcagcggcagatccaccagaccttctgcgggggatggatgcccccagacgcgggccacatactgctttttcggctcgcgctcgcggaactggcgttttaactcccgctccgcggctttggtcagcgccactacaatcacgccgctggtagccatatccagacgatgcacgctttctgcctgcggataatcacgctgaatgcgcgtcatcacgctgtctttgtgctcttccagacgacccggcacactcaacaaaccgctcggcttgttgaccaccataatatggtcatcctgatacaggataaccaaccagggttcctgcggtggattgtagttttccatccccattttcggctccgttactgatgcgttacaacgatcaaacgcagggcatccagacgccaacctgcctgatccaggctttccattacctgctgacggttgctctcaatggcggtcagttcgtcgtcacgaatgttcgggttcactgcacgcagagcttccagacgagacagctcggcagacagtttttcgtcggcttcgttacgcgctgcatcaatcaatgcacgggcagatttctcgatctgcgcttcacccagttgaaggatagcgtgaacatcctgctgcacggcgttaaccagtttgctgccggtgtgacggttaaccgcgttaagctggcggttaaaggtttcaaactctacctgcgccgccaggttgttgccgtttttatccagcagcatacgtaccggcgtcggtggcaggaagcggttgagctgcaactgcttcggagcctgggcttcaaccacataaatcagttccaccaacagcgtacctaccggcaacgctttgttttttaacagactaatcgtgctgctaccggtatcgccagaaaggatcagatccagaccgttgcggatcagcggatgctcccaggtaataaactgtgcatcttcacgcgccagcgccacttcacgatcaaaggtgatggtgatgccatcttcgctcaggccagggaagtccggcaccagcatatgatcggacggcgtcagcacgatcatgttgtcgccgcgatcgtcctgattgataccgataatatcgaacaggttcatggcgaaggcgatcaggttggtatcgtcatcctgctcttcaatgctttctgccagtgcctgggctttttcgccaccgttggagtggatttccagcaggcggtcacgaccctgttccagctgtgctttcagcgcttcatgttgctcgcggcagtttttgatcagatcgtcaaagccttcggtttgatccggactagccagatagttaatcagatcgttgtatacgctatcgtaaatagtgcgtccggtcgggcaggtgtgctcaaatgcatccagaccttcgtgataccagcgcaccagcacgctctgagcggttttctccagataaggcacatggatctgaatatcgtgcgcctggccgatacgatccagacgaccaatacgctgctccagtagatccgggttgaatggcaggtcaaacatcaccatgtggctggcgaactggaagttacgtccttcagaaccgatttcactgcacagcagtacctgtgcgccggtgtcttcttcggcaaaccaggcggcagcgcggtcacgttcgataatgctcataccttcgtggaacaccgcagcgcgaataccttcacgttcgcgcagtacctgctccagttgcagcgcagtggcagctttggcgcagatcaccagcactttctgagagcgatggctggtcaggtagcccatcagccactcaacgcgcggatcgaagttccaccaggtggcgttatcaccttcaaattcctgataaatacgctccgggtagagcatatcgcgagcacgatcttccgcacttttacgtgcgcccataatgccggagactttaatagccgtctgatactgcgtcggtagcggcagcttaatggtgtgcagctcgcgtttcgggaatcctttcacaccgttacgcgtgttacggaacagcacgcggctggtgccgtggcgatccatcagcatgctaaccagctcctgacgggcgctctgggcatcttcgctgtcgctgtttgctgcctgcaacagcggctcgatatcctgctcgccgatcatctcgccgagcatgttcagttcgtcattgctcagtttgttacctgccagcagcatggcaacggcgtccgcaaccggacgataatttttctgctcttcaacgaactgcgcaaaatcgtggaaacggttcgggtccagcagacgcagacgggcgaagtggctttccatccccagctgttccggggtcgcggtcagcagcagaacgcccggcacgtgctctgccagttgttcaatggcctgatattcacggcttggcgcatcttcgctccacaccaggtgatgcgcttcatcgaccaccagcaggtcccattcggcttcacagagatgttccaggcgctgtttgctacgacgggcaaaatccaggctgcaaatcaccagctgttcggtgtcaaacgggttgtaagcatcgtgctgagcttcggcataacgctcatcatcaaatagcgcaaagcgcaggttgaaacggcgcagcatttctaccagccactgatgctgtaaggtttccgggacgataattagcacacgttcagcagcgccagagagcagttgctgatgcaggatcatcccggcttcaatggttttccctaaacccacttcgtcagccagcaggacgcgcggcgcgtggcggcgaccaacatcatgagcgatgttgagctgatgcgggatcaggctggtacgctgaccgcgcaggccgctgtacggcatacggaactgttcgctggaatatttacgcgcgcgataacgcagcgcaaagcggtccatacggtcaatctgcccggcaaacagacggtcctgcggtttgctgaacaccagtttgctatcaaggaaaacttcacgcagggctacgccggactcttcagtatccaggcgagtaccgatataggtcagcaagccattttcttcttttacttcttcgacttgcatctgccagccgtcatggctggtaatggtatcaccagggttgaacatcacgcgggtcacgggggaatcactgcgtgcgtacagacggttttcaccagtagatgggaaaagtaaagtgacagttcgcgcatccaccgcgacaacggttccaagtcccaattcgctttctgtatcgctgatccagcgttgaccaagtgtaaaaggcatatgtgttcggctctatatctttaattgcaggcaataaccacccgctaccgtgcttatgaggtagtggtgttattcaggtccaggaatggaaagggcgctatggtactggatggcaaagcattcgtcacgcatcaaaatggtatctggcgaactcttttttttgctcaaaatagcccaagttgcccggtcataagtgtagcaaaattatcctcaataaaagggagtattccctccgccacgggttgtagctggcgggtcagatagtgttcgtaatccagtggactacgttggtagtccagcggctccgggccgttggtggtccatacgtacttaatggtgccgcgattctgatattgcaaggggcgaccacgcttttggttttcttcatcggcaaggcgagcggcgcgtacatgaggcggcacattacgctgatactcgctcagcggacggcgaaggcgtttacggtaaaccagtcgcgcatccagttcacccgccatcagtttgtcgatggtttcgcgtacatattcctgatatggctcgttgcggaagatgcgcaggtatagctcctgctgaaactgctgggccagcggcgtccagtcggtgcgcacggtttccagccctttaaacaccatccgctgcttgtcgccctcctgaatcagtccggcataacgctttttactgccggtatcggctccgcgaatggttggcatcagaaaacggcagaaatgggtttcatactccagttctaatgcgctggtcagccgttgtttttgcagcgtttccgcccaccaggcgttaacgtgctgcaccagtgcacgaccgattttcgccgcttcttcttcgctatgtgcgcctttcagccagacaaacgtactgtcggtatcgccgtagataacgtcgtagccctgtgcttcaatcaacgctttggtttgccgcatgatctgatgaccacgcatggtgatgctgcttgccagccgcggatcgaagaagcggcaggcggtggtgccgagcacgccataaaaggcattcatgatgattttcagcgcctggctcagcggtttgttaccctggcgtttggcttcatcgcgcccgtgccagatgttagtcacaatctccggcaggcaatgtttttctcggctgaaccaggcatcgagaaaaccttcggtactgtgctctggatcaggctgcgccatgccttccaccagcccgacgggatcaatcagaaaggtgcggatgatgctcgggtacaggcttttatagtccagcaccagcacactatcataaagccctggccgactatccatcacgtagccgccagggctggcgtgcggcggcacttcgccgagattaggcgcgacataaccagcgcgatgcattcgcggaaaatagagatgaccaaatgccgccacgctaccgccgtgtcggtccaccggcaggccgttcaccgttgcccgttcgagtaaaaatggcatgatttcagttttgtggaagatctgcgtcaccagctcgcaatctttcaggttataagttgccagcgcaggtttatcttcggcgaaacggcggtcaatttcgtccattcgatcccacgggttatcgatagattttccttcgcctaatagctcctgagcgacagtttccaggctgaaactagagaaattccagaacgcggatttcagcgcctcgataccgtcgataattagccgacctttagcctgggcaaaaaagacgccgtttttaaagccgtgctcgcgccactccagctcgctattatcgcgcccaagacgcagcggaagacggtaacgctcggcatgtttttgcagcattcgcagatcgaactgcaccacgttccaaccgatgatcacatcaggatcgtagttggcaaaccaggcgttgagtttttccagcaactgcgggcggctggcgacgtattccagttcgaaatcaaggctggaggcgtcgccattctccggccccagcatataaacgatgcgctgcccgcagccttccaggccgatgcagtacagctcaccgtggcgggtggtttcaatatctatagaaacccacttgagcggcggacgatagtcgggatgcggtttcagacgggcattaacgatagtgccattgtgcatatcaccctcgacccacaccggactggtgataaaccgctccatcagatagcgttctggcggacgcacatcggcctcgtagacggtaacgccaccttcacgcaggcgcttttcgtaattcatcaattggcgatgggcgcgacagtaaaggccatacaccggctggcggtgaaaatcctttaacgccagcggtgtcaggcgaaagccttgttcaccctgcaaaatatgctgagcgcggggaacctgatcggcgggaataaacgccacggactcttgcggtgcaagcgtaacctgcaacggcccgttgtccgtcgccagccagaaggagacttctgtcccttgcggggtgtcccgccagtgtcgggttaagataaaacctgcctgcgccacgctgaaaatccatcaaaaaaccaggcttgagtatagcctggtttcgtttgattggctgtggttttatacagtcattactgcccgtaatatgccttcgcgccatgcttacgcagatagtgtttatccagcagcgtttgctgcatatccggtaactgcggcgctaactgacggcagaatatccccatataagcgacctcttccagcacgatggcgttatgcaccgcatcttcggcatttttgccccatgcaaacgggccgtgggaatggaccagaacgccgggcatttgcgctgcatcgataccctgtttttcaaaggtttctacgatgacgttaccggtttcccactcatattcgccgttgatttctgcgtcggtcattttgcgggtgcagggaatggtgccgtagaaatagtcggcgtgggtggtgccggttgctggaatgctctgacccgcctgcgcccagatggtggcgtggcggctgtgcgtatgcacaatgccgccaatggaggggaatgcctgatagagcagccggtgagttggcgtgtcggaggagggctttttcgtaccttcaaccacttcaccggtttcgatgctaaccacgaccatatcgtcagcggtcatgacgctgtaatcgacgccggaaggtttgatcacaaagacgccgcgctcgcgatcaacggcgctgacgttgccccatgtgagcgtgaccaggttgtgttttggcagcgccaggttggcttctaatacctggcgtttgagatcttctaacatgttgactccttcgtgccggatgcgctttgcttatccggcctacaaaatcgcagcgtgtaggcctgataagacgcgccagcgtcgcatcaggcgttgaatgccggatgcgctttgcttatccggcctacaaaatcgcagcgcgtaggcctgataagacgcgccagcgtcgcatcaggcgttgaatgccggatgcgctttgcttatccggcctacaaaatcgcagcgtgtaggccagataagacgcgtcagcgtcgcatcaggcgttacataccggatgcggctacttagcgacgaaacccgtaatacacttcgttccagcgcagcgcgtctttaaacgctggcaggcgtgtgtcgttatcaatcaccgtgatttcaatgtcgtgcatctcggcgaattggcgcatatcgttgaggttcagtgcatggctgaagacggtatggtgcgcgccaccagcgaggatccacgcttcggaagcagttggcagatccggttgcgctttccacagcgcattcgccaccggcagtttcggcagggagtgcggtgttttcaccgtgtcgatgcagttaaccagtagacggtaacgatcgccgagatcaatcaagctggcgacaatcgctgggccggtttgggtattgaagatcaggcgggcaggatcgtccttaccaccaataccgagatgctgaacgtcgaggatcggtttctcttctgcggcgatgctcgggcagacttccagcatatgggagccgagcaccaggtcattacctttctcgaagtgataggtgtagtcctccataaaggaggtgccgccctgcagaccggtactcatcaccttcatgatgcgaagcagggcggcagttttccagtcgccttcgcccgcaaagccgtaaccctgctgcatcagacgctgtacggccagaccaggaagctgtttcagaccgtgcaaatcttcaaaggtggtggtgaacgcgtggaagccaccttgttccaggaaacgcttcatccccagctcaatacgcgccgcttccagcacgttctgtcgttttttgccgtggatttgtgtggcaggcgtcatggtgtagcagctttcgtactcatcgaccagcgcgttaacatcgccgtcgctgatggagttcaccacctgcaccagatcgccaaccgcccaggtattgacggagaaaccgaacttgatctgtgcggcaactttatcgccatcggtgaccgccacttcacgcatgttatcgccaaatcggcagactttcagatgacgggtatcctgtttagagaccgcctgacgcatccaggagccgatacgctcatgggcttgtttatcctgccagtgaccggtaaccacggcatgttgctgacgcatacgcgcgccaatgaagccgaactcgcgaccgccatgtgcagtctggttcaggttcataaagtccatatcgatactgtcccacggcagcgccgcgttgaactgggtgtggaattgcagcaacggtttgttgagcatggtcaggccgttgatccacattttggccggggagaaggtgtgcagccacaccaccagaccagcgcaacgatcgtcgtaattcgcgtcgcggcaaatagcggtgatttcatccggcgtggtgcccagcggtttcaacaccagtttgcagggcagtttcgcttccgtattcagcgcattaacgacgtgctcggcatgttgggtgacctgacgcagggtttccgggccatacagatgctggctgccaatgacaaaccacacttcataattatcaaaaatcgtcattatcgtgtccttatagagtcgcaacggcctgggcagcctgtgccggggcggaagttggaagatagtgttgttcggcgctcatcgcccattgctgatagcggcgataaagctgttcaaagcgttgtgcctgctcgctgcacggttgcagggttttctctaccgcactggccattttttgctgagcacttgggatgtctgcgtgcactttcgcggcgacggcagcaaaaatcgccgcaccgagcgcacagcactggtcagaggcaacaatttgcagcgggcgattcagcacgtcgcagcaggcctgcataatgacctggtttttccgcgcgatgccgcccagtgccatcacgttattaacggcgatcccctgatcggtaaagcactccatgattgcgcgtgcgccaaaggcggtggcagcaatcaaaccgccgaacagcagcggagcgtcggtagcgaggttaagatcggtaatcacccctttcaggcgttggttagcgttcggtgtgcggcggccgttaaaccagtcgagcaccaccggcaggtgatccagagacggatttttggcccatgcttcggtcagcgccggaagcagttgtttctggctggcgttgatttgcgttttcagttccggatgctgggcggcaagctgttccagcggccagccgagtacgcgaccaaaccaggcgtagatatcaccaaacgcgctttggcctgcttccagaccgataaatccaggcaccacgctgccatcaacctgaccgcaaatacctttaactgcccgctcgccaacgctctgtttgtcggcaatcagaatgtcgcaggtggaagtaccgataacttttaccagtgcgttaggctgtgcgcctgcgccaactgcgcccatatggcagtcaaacgcgccgccggaaatcaccacgctttcaggcaggccgagacgctgcgcccattccgggcataaggtgcccaccggaatatcggcagtccaagtgtcagtgaacagcggggaaggcaaatggcgattgaggatcgggtccagctcatcaaagaaactggctggcggcaggccgccccagctttcgtgccacagagatttatgcccggcgctgcaacgtccgcgacgaatatcctgcgggcgggtggtaccggaaagcagagctggcacccagtcgcacagctcaatccagcttgcggcagattgcgccacggcgctgtcctggcgagtcacatgcaggatttttgcccagaaccattcgctggaataaataccaccaatgtagcgggagtagtcaacgttgcccggcgcgtggcacaaacgggtaatctcttccgcttcttcaaccgcagtgtggtctttccacaatacgaacatcgcgttcgggttttcggcaaactccgggcgcagcgccagcacgtttccgtcggcatcaatcggtgcgggcgtgctgccggtactgtcaacgccaatcccgaccacagctgcgcgctgttcgacgctaagctctgcaagcacggttttcagtgccgcttccatactctcaatgtagtcacgcggatgatgacggaactggttattcggggcatcacaaaattgccctttctgccaacggggataccactctacgctggtggcgatctcttcaccggtagcgcagtccaccgccaaagctcgcacagaatcactgccaaaatcgaggccaattgcaatcgccatcgtttcactccatccaaaaaaacgggtatggagaaacagtagagagttgcgataaaaagcgtcaggtaggatccgctaatcttatggataaaaatgctatggcatagcaaagtgtgacgccgtgcaaataatcaatgtggacttttctgccgtgattatagacacttttgttacgcgtttttgtcatggctttggtcccgctttgttacagaatgcttttaataagcggggttaccggttgggttagcgagaagagccagtaaaagacgcagtgacggcaatgtctgatgcaatatggacaattggtttcttctctgaatggtgggagtatgaaaagtatggctgaagcgcaaaatgatcccctgctgccgggatacagctttaacgcccatctggtggcgggtttaacgccgattgaggccaacggttatctcgatttttttatcgaccgaccgctgggaatgaaaggttatattctcaatctcaccattcgcggtcagggggtggtgaaaaatcagggacgagaatttgtctgccgaccgggtgatattttgctgttcccgccaggagagattcatcactacggtcgtcatccggaggctcgcgaatggtatcaccagtgggtttactttcgtccgcgcgcctactggcatgaatggcttaactggccgagtatatttgccaatacgggtttctttcgcccggatgaagcgcaccagccgcatttcagcgacctgtttgggcaaatcattaacgccgggcaaggggaagggcgctatagcgagctgctggcgataaatctgcttgagcaattgttactgcggcgcatggaagcgattaacgagagcctccatccaccgatggataatcgggtacgcgaggcttgtcagtacatcagcgatcacctggcagacagcaattttgatatcgccagcgtcgcacagcatgtttgcttgagcccgagccgtctgagtcatcttttccgccagcagttagggattagcgtcttaagctggcgcgaggaccaacgcattagtcaggcgaagctgcttttgagcactacccggatgcctatcgccaccgtcggtcgcaatgttggttttgacgatcaactctatttcagccgagtatttaaaaaatgcaccggggccagcccgagcgagtttcgtgccggttgtgaagaaaaagtgaatgatgtagccgtcaagttgagttaattggtaacgaatcagacaattgacggcttgacggagtagcatagggtttgcagaatccctgcttcgtccatttgacaggcacattatgcaagcattgctggaacactttattacccaatccaccgtgtatagtttgatggcggtggtgttggtggcctttctggagagcctggcgctggtcggtttgattctacccggtacggtgctgatggcggggctgggagcgctgattggcagcggcgagttaagtttctggcacgcctggctggcagggattattggctgcttgatgggcgactggatttctttctggctgggttggcgttttaaaaagccgttgcatcgctggagttttctgaagaaaaacaaagcactacttgataaaactgaacatgcgttgcatcaacacagcatgttcaccattctggtcggtcgttttgttggcccgacgcgtccgctggtgccaatggtggcgggaatgctggatctgccggtggctaaatttattacgccgaatattatcggctgcctgctgtggccgccgttttacttcctgccagggattctggcgggcgcggcgatcgatattcctgccggaatgcagagcggtgagtttaaatggttgctgctggcaacagcggtgtttttgtgggttggtggctggctgtgctggcggttatggcgcagcggtaaagcgactgaccgtttgagtcattatttgtcccgcggtcgtttgttgtggctgacgccgttgatttctgccatcggcgtggtggcgctggtggtgttaattcgccacccgttgatgccggtgtatatcgatattttgcgtaaagtggttggggtttaagagatagtcttgtgcgggttgcctgatgcgacgcttgccgcgtcttatcaggcctacaaaacgcactacccgtaggtcggataaggcgttcacgccgcatccgacagtgcatattaacccgtaatccccaatagtgcgctagcactcgccttaccgctcaacaactcattggtcataccctgccaggcgatgcgcccgtcggcgactactacgctgcgcgtggcgatccgcgccgcatcttccacgctgtggctcaccatcaatagcgtcattttttgctgctggcagctcgtgctcaccagcgtcaacatctcctgacgtaacgccggatcgagcgcagagaacggttcatcgagcaataaaatcggctgttcgcgtaccagacaacgcgctaacgccactcgctgtcgctgaccgccggaaagctcgcccggtaaccgcgccattaaattatcaatccccatctggcgggcgatagcgtgcattttcccctgctgtaccgcgttcagtttcaatcccggatttagccccagcccgatgttctgtgcgaccgtcaggtggctgaacaggttgttctcctgaaacagcatgctcaccggacggcgactcggcggcatagttgtgtgatctacgccatcgatagtcaggctaccgctggctggcgtcagaaaaccggcgatcaaattcagcagggtacttttacccgcgccgcttggcccgaggatcgccacctgctcgccgcgttccaccgttaagctaaaacgcatcggcaaatggtggtaaagccaggtgatatcagtcagttttaacatttcgccccggtagtttttcaatcacggtaaacagcagaaaacagagcagcagcagaattaacgcggtgaccgcaccgtcctggctgcgataggagccaatttgctggtagagataaaacggcagggtgcggaaatcatcgttaccgaacaacgccaccacgccaaaatcaccaatgctcagcacgcatgcaaaggccagcgcctgcgccagtggacgtttcagggcgcgcagctccaccacttttaagcgactccagccttcaatccccaggctctgacataacatgctgtagcgggcggtgatatcgcgcatcgggttttccagcactttcagcgcataagggatcgccattaacgcattggtgaaaatcacaatgccgtcagcagattgtggcaggccgatagtgttgttgagcagtaaaaagaagccggtagccagcacaatccccggcatggcgaggatcaacatgccgctcatctccagcacctgacccgccagcattttctgccgcgcccgcagttcgcgactgctccatagcagcatcatggtcagcactacgcacaatacacctgccgccagcgcaatacgcaagctggtccacagcgcctgccacagcaccggttgtgccagcacttccggcaactggcgatttaccccatcgacgatcaccgccagtaacggtggcagcaacagcagcagcgccagcacaattaacaccgtgtcgcaaatgcggctatgcagacgatcgtccgggtcgcgccagccttgcagcagcgtggtgccgggcgcaatggccttactcaatcgctgactcaacagcaccagcccgaggcagcacaccatctggagcagcgccagcattgccgcgcgggcaggatcgtagtcgtaactcagcgcctgatagattgccagctcgatagtggtcgcctgcggaccgccccccaggcttagcacggtggcgaagctggcgaaacagagcataaagataagcgcagcaaccggcgggatttgtcgccgtaaccacggccattcgacgaagcggaaaaaatgccagctacgcatcccaagctgggcggcaagttgacgctgttcgccggggatgttttccagtgcctggagtaataagcggctcgccatcggcagattaaaaaacacatgggccagcaaaataccttgcaggccgtaggggctaaaggtccactccagaccgaggctttggcagagtgttgccagccagccctggcgaccatagacgctaagaatgccgaaaacagcgaccaacaccgggaggatcaaggtcattgcacacagacgcaacagcgccagccgacccggaaagcgcctgcgatagagcgcgcgggcgaggaatatcgcgggtatgacagagagcagtgcgctgagaaacgcctgccagaaggagaagcgcaccacatgccacagatagctgtcctgccagactgccacccagtcatcctgcggcgcgttccaccacagggcgagaaacgccgccagcgcaaccgctaccaccagcgtggtggcgcttacacctggaattaaccagccgggaattaacggctgacggcgcgttgccattcgctaatccatgcctgacgttgtgccgccacttcggctggcgtgaactccaacgtggttgcgggtttggtcaatttttcaaaaccggcaggcagcgtgacgtttgccaccggatacatccagttgccggttgggatcgcattctggaaagccggagaaaccataaactggaggaatttttgcgccagctccggctgcttgctggcagcggtgcgggcggcgacttccacttgcagatagtgaccttcgctgaagttcgcggcggcgtagttatctttcttctcttcgagaatgtgataagccggagaggtggtgtaactcagtaccagatcgctttcaccttttaaaaacaggccgtaggcttcgctccagcctttggtgaccgtgaccgttttcttcgccagtttctgccaggcttgtggggcgtcatcgccatagactttttgcatccatagcaacagacccagccccggtgtactggtgcgcggatcctgataaatcacccgccagttttgatcgctctcaaccagttctttcaggctttgtggcgggtttttcagtttgttcttgtcataaacgaaggcgaagtagccataatcaaacggtacgaaagtgtcattattccagccgccgggaacgttaacggcatccgctgccacaccgcttttggcaaacagtccggttttactggcggcgtctaacaggttgttatccagccccagcaccacatcggctttactgtttttgccttccatccgtagacggttgagaaggctaacgccatcttccagcgccaccagtttcagttcgcaattacagtcggcttcaaaggcttttttaaccaccggaccaggcccccagtcggcggcgaaggaatcgtaggtataaacagtcagaacgggtttagcgaaaacgggcgctgtgcacagcaacagcaggggcagacatttttttaacactttgcacctcaaaaaagagtggcaaaggacttgagaaggagcctcaaatcccttcgccggcgttatccggatcaggttcgacgggtattttctcagcgcacgcgtacgcgtggcaccccgttgagaacggcgttagtgtagtgattttgttatcaaccagcaatcatggatccggtggcgcaaaccacgcacttttaaaatcgaaccagccgagggtattcatgcgcaggccgcgcatactgcgttgcccctgaatgatcagccagtggtgcaataatggcaccatcgctttgctggcgaccagttgctggcaccagttcgccagattcatctcgccattgcgccagcgagcagcgtcggcttgccagtcaatgggaatgcaatgttgtagcagtggcacttcgcataaatgtgcgaaaacagagaagtccagcggcagggtaaagttggcgctgtttagccagatatcactttcgatctctcctgtatgccactgatcgtagtcgatctctttgattttcagcgtgacctggtgacttgccagaatctgctgcatgatcccggcaatcacccgatgctcactgtgatcctgataaaaggttagggtgaggctttccaggccagccggtttttcgctctttatggtgcgggcatggtgccaacgggggagcagtccataagccgggaaccacagttgctggtactgttcctcagcgaaatagaccagattagttggagaaagcacatagcttacccagtccctgacttgctgattcgccccgcgatgggtgcggctgtcgaacagtaaatagtagcaaccttcctccaggcggctttcaatctctttttcctcgccctgtggaccttttagcatcagccctccggctggctcgtcggcaatttccggcagaacccagacgttaacttcgtcgattaatgcccggtaaccgaagaagtcatcgaatgcctgaattttcagttgattggtgctgttgcgaatcaccgcatacggaccggtgccgatgggatggctggcaaagttactgagggtttcccattcgcgcggcaggatcatcgccggaacttgccccagcagtaacggtaaccagcggtccggttgcgtgagatggatatccagcgtccagggcgtcgggctcacaatgtcagcaatatggctatagagcggcagcgtattgattcgttttaaagaggcgatcacatcgtccatttccagttcacgaccatggtgaaaatggactcctggacgcaaaaagaaacgccagtgaagcggactaatttgctgccagtggtgggcgatgtctgcttccagttccccattttcctcatttatgcgcgttaggctactgaagatttgccgggcgatatgggtttcggaacggcgcaatgcgctgccaggtagcagattacgcaacggacgatagtagagcacgcgcaggatgtgccgcccctggcggaagctgcggcccagatgagaaaccagcatttgccgcacagtcgctttgtcgccaaccaactgcaccagttgatcgatacgatcctgctccagcaggtcttccgcccgctgttgctgaagcgccagcccggtatagaggaatgtcagacggctgcgtttaccgcgcccgacttccgcttcccacgtcagccagccgcgatcctgcatggtgttgagcagggtgcgcatatgacgacggctgcagctcaataacgctgccagttcgttgagcgttgtgtcctggcttttaccctcgcagcattgccacaggcggatgaactgttgttgcagacgagcagatggcataaaaggggaactcctgtgcaaaagacagcaattttattttccctatattaagtcaataattcctaacgatgaagcaagggggtgccccatgcgtcagttttatcagcactattttaccgcgacagcgaagttgtgctggttgcgttggttaagcgtcccacaacgattaaccatgcttgaaggactgatgcagtgggatgaccgcaattctgaaagttgacttgcctgcatcatgtgtgactgagtattggtgtaaaatcacccgccagcagattatacctgctggttttttttattctcgccgcgctaaaaagggaacgtatgatctggataatgacgatggctcgccgtatgaacggtgtttacgcggcatttatgctggtcgcttttatgatgggggtggccggggcgctacaggctcctacattgagcttatttctgagtcgtgaggttggcgcgcaacctttctggatcggcctcttttatacggtgaatgctattgctgggatcggcgtaagcctctggttggcaaaacgttctgacagtcagggcgatcggcgaaaactgattatattttgctgtttgatggctatcggcaatgcgctattgtttgcatttaatcgtcattatctgacgcttatcacctgtggtgtgcttctggcatctctggccaatacggcaatgccacagttatttgctctggcgcgggaatatgcggataacagcgcgcgagaagtggtgatgtttagcagcgtgatgcgtgcgcagctttctctggcatgggttatcggtccaccgttggcctttatgctggcgttgaattacggctttacggtgatgtttagcattgccgccgggatattcacactcagtctggtattgattgcatttatgcttccgtctgtggcgcgggtagaactgccgagcgaaaatgctttaagtatgcaaggtggctggcaggatagtaacgtacggatgttatttgtcgccagcacgttaatgtggacctgcaacaccatgtacattattgatatgccgttgtggatcagtagcgagttaggattgccagacaaactggcgggtttcctgatggggacggcagctggactggaaataccagcaatgattctggctggctactatgtcaaacgttatggtaagcggcgaatgatggtcatagcagtggcggcaggagtactgttttacaccggattgattttctttaatagccgtatggcgttgatgacgctgcaactttttaacgctgtatttatcggcattgttgcgggtattgggatgctatggtttcaggatttaatgcctggaagagcgggggcagctaccaccttatttactaacagtatttctaccggggtaattctggctggcgttattcagggagcaattgcacaaagttgggggcactttgctgtctactgggtaattgcggttatttctgttgtcgcattatttttaaccgcaaaggttaaagacgtttgatgacgtggacgatagcggaaagcccggtcatttgaccgggcaaggggattaattcataaacgcaggttgttttgcttcataagcggcaatggcgtcgtcgtgctgcaaggtaagcccaatactgtccagaccgttcatcatgcagtggcggcggaaggcatcgatggtaaagcgataggttttctctcccgctttcacctcttgcgcttccagatccacgtcgaaatggatccccggattagctttcaccagcgcaaacagttcgtccacttctgcatcgcttaatttcaccggcagcagctggttgttaaagctattgccgtagaagatgtcagcaaaactcggcgcaatcaccactttaaaaccgtagtcggtcaatgcccagggcgcgtgctcacggctagagccacagccgaagttttctcgtgccagcaaaatggaagcgccctgatactgcgggaagttcagcacgaagtccgggtttggctgttggcctttttcatccagaaaacgccagtcgttaaacagatgcgcgccaaaacccgtacgggtcactttctgcaaaaactgtttcgggatgattgcatcggtatcgacattggcggcatccagcggaaccaccaggcctgtgtgtttgataaatttctctgccatggtgtgctccttatttaatgttgcgaatgtcggcgaaatgtccggtcacagcagcagcggcagccattgccgggctgaccagatgcgtgcgcccgccgcgcccctggcggccttcaaagttacggttgctggtggaggcacaacgttcgcccggattcagacggtcgttgttcatcgccagacacatactgcagccaggcaagcgccattcaaaaccggcttcaataaagattttatccagaccttccgcttccgcctgggcttttaccgggccagagccgggaaccaccagtgcctgcacgcctggcgcgacttttcgccctttggcgatctccgctgccgcgcgtaaatcttcaatgcggctgttggtacaggaaccgataaacactttgtcgatagccacttcggtcagcggaatacccggtttcagccccatataggccagcgctttttctgcgctcgcgcgttcaaccggatcggcaaagctagccggatcgggaatattgtcgttcacggaaatcacctggccgggattggtgccccaggtgacctgcggactaatttcttctgcttgcagagtgacaacggtatcgaaagttgcgccttcgtcggtttgcagggttttccagtaggcaacggcgtcgtcgaaatctttgcctttcggcgcatgcagacggcctttgacatagttaaaggtggtttcgtccggtgcaaccagaccggcttttgcgcccatttcgattgccatattgcacagggtcatacgaccttccatgcttaaatcacggattgcttcgccgcaaaactccaccacatgcccggtgccgcctgcgctaccggttttaccgataattgccagcacgatatcttttgcggtaatgcccggcgcggctttgccctggacttcaattttcatggtttttgcgcggccctgtttcagggtttgcgttgccagtacgtgttcaacttcggaagtgccgataccaaaggccagtgcgccaaacgcgccgtgggtggcggtatggctgtcgccgcagacaatggtcatccccggcaaggtgacgccctgttccggccccattacgtggacgatcccctgatacgggtgattcaggtcatacagttcgacgccaaattctttgcagtttttgatcagttcctgcatctggatacgcgccatttcaccgcaggcattaatgtctttggtctgggtagagacgttgtgatccatggtagcgaaggttttgcccggctgacgtaccgggcgaccgtgggcgcgcagaccatcgaacgcctgcggactggtcacttcatgcaccaggtggcggtcgatatataacagtggggtttcgttttcggcttcgtacacaacgtgagcgtcgaacaatttttcgtataacgtcttagccatgattacaccccttctgctacatagcgggcaatgatatcgcccatttcatcggtactaacggcggcagcgccacgggctaaatccccggtgcgaatgccttcttctaatgcgcggttaatggcgcgttcaatggcgcaagccgcatcatcggcatccaggctgtaacgcagcagcagtgccaggctaaggatttgtgcaatcgggttggcgatgtttttgcctgcgatatctggtgcgctgccgcccgccggttcatacagtccaaaaccttgctcgttcaggctggcggaaggcaacatccccatgctgccagtgatcattgcgcactcgtcagacagaatgtcgccaaacaggttggagcacagcagaacgtcaaactgacttggatctttaatcagctgcatggtggcgttgtcgatgtacatatgcgccagttcgacatccgggtattccgtggcgatctcgttaacgatctcccgccataaaatagaggattgcagcacgttggctttatcgatgctcgtcactttgtggcgacgcttgcgagcagattcaaacgcgatgcgggcgatacgttcgatctcaaaacggtgatacacctcggtatcaaaggctttttcatattgtccgctaccttcgcggccttttggctgaccgaaatagatgccgccggtcagttcgcgcacacacaggatgtcgaagccgtttgcggcaatgtctgcacgcagcggacagaatgcttccagcccctgatacagttttgccgggcgcaggttgctgaataatttgaagtgcttacgcagaggcagcagcgcgccgcgttctggttgctggtctggtggtaaatgttcccacttcgggccgcctacgctgccaaacagcacggcatcggcttgctcacaaccttcaaccgtcgcaggcggcagtggttgcccgtggttatcaatggctgcgccgcctacatcgtaatggctggtggtgatgcgcatcgcaaagcggttgcgcacggcatccagcactttcagcgcctgggtcatcacttccggaccaataccgtcccccggcaatacggcaatatggtaattcttgctcatcacacggtttccttgttgttttcgttgtgttgagctttgcgttgcaactctttttcgacttctgcggcacgccagatattgttcagaacgtgcaccatggctttggcagaactctcgacaatatcggtagccaggccgacgccgtggaagcggcgaccgttgtagttagcgacgatatccacctgacccagcgcatctttaccgtggcctttggcggtcaggctgtatttcaccagttcgacgttatattcagtgatgcggttaattgcctgatagacggcatcgaccggaccgttaccgttggcggcttctgctttgacttcttcgccacaggccagtttgacggcggcggtggcgatatcgttagagccagactgcacgctgaagtaatccagacggaaatgctccggctcttcttgctgcttaccgatgaaggccagcgcctccagatcgtaatcaaacacctgaccttttttgtccgccagcttcaggaaagcatcgtacaaattgtctaaattatattcactttctttataccccatctcatccatgcgatgtttcaccgccgcacgcccgctacgagaggtcagattcagctggatttggttcagaccaatagattctggtgtcatgatttcgtagttttcgcggtttttcagcacgccatcctggtgtataccggaggagtgtgcgaatgcgccgctgccaacaatggctttgtttgccgggatcggcatattacaaatctggctaactaactggctggtgcgccatatctcctggtgattaatggcggtgtggacgttgagaatatccttacgaactttgatcgccatgatgacttcttccagggaacagtttccggcacgctcgccgatcccgttcattgcgccttccacctggcgtgcaccggcatgtaccgccgccagactgtttccgaccgccaggcccaaatcgtcgtgggtatgtacggagataatggctttgtcgatgttaggcacgcgttcatacaggccgctgatgattccggcgaactcaaacggcatggtgtagcccacggtgtccggaatgttgatggtggtggcaccggcattaatcgccgcttcgaccactcgcgccagatcggcaatgggtgtacgcccggcatcttcgcaagaaaattcaacatcatcggtgtaattacgggcgcgtttcaccatatagatagcgcgttcgatcacctcgtccagcgtgctgcgcagcttggtggcgatgtgcattgggctagtggcaataaaggtatgaatacggaaggcttcggcgactttcagggattcggccgccacgtcgatatctttttccacgcagcgagctaacgcacatacgcggctgtttttaacctggcgggcgatggtttgcacgctttcaaaatcgcccgggctagagacggggaaaccgacttccatcacgtcaacacccatacgctcaagggccagcgcaatttgcagtttttctttcacactcaagcttgcctgtaacgcctgttcaccgtcgcgcaatgtggtatcgaaaataatgacttgctggctcatggtttgggtccttgtctcttttagagcgcctcgcttcgggcataaaaaaacccgcgcaatggcgcgggttttttgtttgactgcgtgctggcttaatgctggatgccgctcactcgtctaccgcgcaaagaagatgcgtttagtagtagtagaccgataaagcgaacgatgtgagtcattaaatcagctccagatgaatgcgatatgcttttagagttactggatacaaaaacggatgtcaaccctgacgcaataaaaacgtcccgccagcgtgagttctgcatccgtaaaattagctaattgtgctgcggtggttaaagtaagcgatattaatttctgcttaactaccgacgcttttcatcggttgacatatttcagcataaatttttgcatctaatcaacgaggaaaaaggggacaaaatgcacgcgttgcaaaacctatcctgatgatttgtattgaattatatgttttgcgattttttttgatattgatttggtgaatattattgatcaattaatgttaagaattaatgcattaaatatataaattaattattaaataagcacatttaatccattttgtagatgattgagtattcgcggtagttatgattagattgttttcgcaacaaaaacattatggattattatgctgtggtaaatgactcattccacggcaatggattctgtttttatcagaacccgtatctttatgttttccgaattttactcattttgctttttcttattttatatgcatgataaatcatattcttcaggattatttctctgcattccaataagggaaagggagttaagtgtgacagtggagttaagtatgccagaggtacaaacagatcatccagagacggcggagttaagcaaaccacagctacgcatggtcgatctcaacttattaaccgttttcgatgccgtgatgcaggagcaaaacattactcgtgccgctcatgttctgggaatgagccaacctgcggtcagtaacgctgttgcacgcctgaaggtgatgtttaatgacgagctttttgttcgttatggccgtggtattcaaccgactgctcgcgcatttcaactttttggtagtgttcgtcaggcattgcaactagtacaaaatgaattgcctggtagtggttttgaacccgcgagcagtgaacgtgtatttcatctttgtgtttgcagcccgttagacagcattctgaccagccagatttataatcacattgagcagattgcgccaaatatacatgttatgttcaagtctagtttaaatcagaacactgaacatcagctgcgttatcaggaaacggagtttgtgattagttatgaagacttccatcgtcctgaatttaccagcgtaccattatttaaagatgaaatggtgctggtagccagcaaaaatcatccaacaattaagggcccgttactgaaacatgatgtttataacgaacaacatgcggcggttagcctcgatcgtttcgcgagttttagtcaaccttggtatgacacggtagataagcaagccagtatcgcgtatcagggcatggcaatgatgagcgtacttagcgtggtgagccaaacgcatttggtcgctattgcgccgcgttggctggctgaagagttcgctgaatccttagaattacaggtattaccgctgccgttaaaacaaaacagcagaacctgttatctctcctggcatgaagctgccgggcgcgataaaggccatcagtggatggaagagcaattagtcagtatttgcaaacgctaactgattgcagaataggtcagacatgaatgtctggtttattctgcattttttattgaatgtagaattttattctgaatgtgtgggctctctattttaggattaattaaaaaaatagagaaattgctgtaagttgtgggattcagccgatttattatcaatttaatcctctgtaatggaggattttatcgtttcttttcacctttcctcctgtttattcttattaccccgtgtttatgtctctggctgccaattgcttaagcaagatcggacggttaatgtgttttacacattttttccgtcaaacagtgaggcaggccatggagatgttgtctggagccgagatggtcgtccgaagccttatcgatcagggcgttaaacaagtattcggttatcccggaggcgcagtccttgatatttatgatgcattgcataccgtgggtggtattgatcatgtattagttcgtcatgagcaggcggcggtgcatatggccgatggcctggcgcgcgcgaccggggaagtcggcgtcgtgctggtaacgagcggtccaggggcgaccaatgcgattactggcatcgccaccgcttatatggattccattccattagttgtcctttccgggcaggtagcgaccagcttgataggttacgatgcctttcaggagtgcgacatggtggggattagccgaccggtggttaaacacagttttctggttaagcaaacggaagacattccgcaggtgctgaaaaaggctttctggctggcggcaagtggtcgcccaggaccagtagtcgttgatttaccgaaagatattcttaatccggcgaacaaattaccctatgtctggccggagagcgtcagtatgcgttcttacaatcccactactaccggacataaagggcaaattaagcgtgctctgcaaacgctggtagcggcaaaaaaaccggttgtctacgtaggcggtggggcaatcacggcgggctgccatcagcagttgaaagaaacggtggaggcgttgaatctgcccgttgtttgcagtttgatggggctgggggcgtttccggcaacgcatcgtcaggcactgggcatgctgggaatgcacggtacctacgaagccaatatgacgatgcataacgcggatgtgattttcgccgtcggggtacgatttgatgaccgaacgacgaacaatctggcaaagtactgcccaaatgccactgttctgcatatcgatattgatcctacttccatttctaaaaccgtgactgcggatatcccgattgtgggggatgctcgccaggtcctcgaacaaatgcttgaactcttgagccaagaatccgcccatcaaccactggatgagatccgcgactggtggcagcaaattgaacagtggcgcgctcgtcagtgcctgaaatatgacactcacagtgaaaagattaaaccgcaggcggtgatcgagactctttggcggttgacgaagggagacgcttacgtgacgtccgatgtcgggcagcaccagatgtttgctgcactttattatccattcgacaaaccgcgtcgctggatcaattccggtggcctcggcacgatgggttttggtttacctgcggcactgggcgtcaaaatggcgttgccagaagaaaccgtggtttgcgtcactggcgacggcagtattcagatgaacatccaggaactgtctaccgcgttgcaatacgagttgcccgtactggtggtgaatctcaataaccgctatctggggatggtgaagcagtggcaggacatgatctattccggccgtcatagtcaatcttatatgcaaagcctacccgatttcgtccgtctggcggaagcctatgggcatgtcgggatccagatttctcatccgcatgagctggaaagcaaacttagcgaggcgctggaacaggtgcgcaataatcgcctggtgtttgttgatgttaccgtcgatggcagcgagcacgtctacccgatgcagattcgcgggggcggaatggatgaaatgtggttaagcaaaacggagagaacctgattatgcgccggatattaagtgtcttactcgaaaatgaaagtggcgcgttatcccgcgtgattggccttttttcccagcgtggctacaacattgaaagcctgaccgttgcgccaaccgacgatccgacattaagccgtatgaccatccagaccgtgggcgatgaaaaagtacttgagcagatcgaaaagcaattacacaaactggtcgatgtcttgcgcgtgagtgagttggggcagggcgcgcatgttgagcgggaaatcatgctggtgaaaattcaggccagcggttacgggcgtgacgaagtgaaacgtaatacggaaatattccgtgggcaaattatcgatgtcacacccagcctttataccgttcaattagcaggcaccagcggtaagcttgatgcatttttagcaagcattcgcgatgtggcgaaaattgtggaggttgctcgctctggtgtggtcggacttagccgcggcgataaaataatgcgttgagaatgatctcaatgcgcaatttacagcccaacatgtcacgttgggctttttttgcgaaatcagtgggaacctggaataaaagcagttgccgcagttaattttctgcgcttagatgttaatgaatttaacccataccagtacaatggctatggtttttacattttacgcaaggggcaattgtgaaactggatgaaatcgctcggctggcgggagtgagccggaccactgcaagctatgttattaacggcaaagcgaagcaataccgtgtgagcgacaaaaccgttgaaaaagtcatggctgtggtgcgtgagcacaattaccacccgaacgccgtggcagctgggcttcgtgctggacgcacacgttctattggtcttgtgatccccgatctggagaacaccagctatacccgcatcgctaactatcttgaacgccaggcgcggcaacggggttatcaactgctgattgcctgcagtgaagatcagccagacaacgaaatgcggtgcattgagcaccttttacagcgtcaggttgatgccattattgttagcacgagcttgcctcctgagcatcctttttatcaacgctgggctaacgacccgttcccgattgtcgcgctggaccgcgccctcgatcgtgaacacttcaccagcgtggttggtgccgatcaggatgatgccgaaatgctggcggaagagttacgtaagtttcccgccgagacggtgctttatcttggtgcgctaccggagctttctgtcagcttcctgcgtgaacaaggtttccgtactgcctggaaagatgatccgcgcgaagtgcatttcctgtatgccaacagctatgagcgggaggcggctgcccagttattcgaaaaatggctggaaacgcatccgatgccgcaggcgctgttcacaacgagctttgcgttgttgcaaggagtgatggatgtcacgctgcgtcgcgacggcaaactgccttctgacctggcaattgccacctttggcgataacgaactgctcgacttcttacagtgtccggtgctggcagtggctcaacgtcaccgcgatgtcgcagagcgtgtgctggagattgtcctggcaagcctggacgaaccgcgtaagccaaaacctggtttaacgcgcattaaacgtaatctctatcgccgcggcgtgctcagccgtagctaagccgcgaacaaaaatacgcgccaggtgaatttccctctggcgcgtagagtacgggactggacatcaatatgcttaaagtaaataagactattcctgactattattgataaatgcttttaaacccgcccgttaattaactcaccagctgaaattcacaataattaagtgatatcgacagcgcgtttttgcattattttgttacatgcggcgatgaattgccgatttaacaaacacttttctttgcttttgcgcaaacccgctggcatcaagcgccacacagacgtaacaaggactgttaaccggggaagatatgtcctaaaatgccgctcgcgtcgcaaactgacactttatatttgctgtggaaaatagtgagtcattttaaaacggtgatgacgatgagggattttttcttacagctattcataacgttaatttgcttcgcacgttggacgtaaaataaacaacgctgatattagccgtaaacatcgggttttttacctcggtatgccttgtgactggcttgacaagcttttcctcagctccgtaaactcctttcagtgggaaattgtggggcaaagtgggaataaggggtgaggctggcatgttccggggagcaacgttagtcaatctcgacagcaaagggcgcttaagtgtgcctacccgttatcgggaacagctgcttgagaacgctgccggtcaaatggtttgcaccattgacatttatcacccgtgcctgctgctttaccccctgcctgaatgggaaattatcgagcaaaaattaagccgtctgagcagcatgaacccggttgagcgccgtgtgcagcgcctactgttaggtcatgccagcgaatgtcagatggatggcgcaggtcgattgttaatcgcgccagtactgcggcaacatgccgggctgacaaaagaagtgatgctggttggacagttcaacaagtttgagctgtgggatgaaacaacctggcatcaacaggtcaaggaagatatcgacgcagagcagttggctaccggagacttaagcgagcgactgcaggacttgtctctataaaatgatggaaaactataaacatactacggtgctgctggatgaagccgttaatggcctcaatatccgtcctgatggcatctacattgatgggacttttggtcgcggtggtcacagtcgtctgatcctcagccagcttggcgaagaggggcgtttgctggcgatcgatcgcgacccgcaggctatcgccgttgcgaagactattgatgatccgcgcttctccatcatccacggacctttctccgcgctgggcgaatacgttgccgagcgcgatcttatcggcaagatcgacggcattctcctcgatcttggcgtctctagtccgcaacttgatgatgctgaacgtggcttttcctttatgcgcgatggtccgctggacatgcgtatggacccaacccgtgggcagagtgccgctgaatggctacaaaccgcagaagaagccgatatcgcctgggtattgaaaacctatggtgaagagcgttttgccaaacgcattgcccgcgccattgtcgagcgtaaccgcgaacagccgatgacccgcaccaaagaactggcggaagtcgtggctgctgcaacgccggtgaaagataagtttaaacatcccgcgacccgtaccttccaggcggtgcgcatttgggtaaacagtgaactggaggagatagagcaggcgctaaaaagcagcctcaacgtgctggccccgggtgggcggcttagcatcatcagcttccacagcctggaagaccgtattgtgaaacgttttatgcgtgaaaacagccgcggtccgcaagttccggcagggttaccgatgactgaagagcagctcaaaaaactgggtggccgtcagctgcgagcactaggcaagttaatgccgggcgaagaagaggtggctgagaaccctcgtgcccgtagtagtgttctgcgtattgcagagaggacgaatgcatgatcagcagagtgacagaagctctaagcaaagttaaaggaagcatgggaagccacgagcgccatgcattgcctggtgttatcggtgacgatcttttgcgatttgggaagctgccactctgcctgttcatttgcattattttgacggcggtgactgtggtaaccacggcgcaccatacccgtttactgaccgctcagcgcgaacaactggtgctggagcgagatgctttagacattgaatggcgcaacctgatccttgaagagaatgcgctcggcgaccatagccgggtggaaaggatcgccacggaaaagctgcaaatgcagcatgttgatccgagtcaagaaaatatcgtagtgcaaaaataaggataaacgcgacgcatgaaagcagcggcgaaaacgcagaaaccaaaacgtcaggaagaacatgccaactttatcagttggcgttttgcgttgttatgcggctgtattctcctggcgctggcttttctgctcggacgcgtagcgtggttacaagttatctccccggatatgctggtgaaagagggcgacatgcgttctcttcgcgttcagcaagtttccacctcccgcggcatgattactgaccgttctggtcgcccgttagcggtgagcgtgccggtaaaagcgatttgggctgacccgaaagaagtgcatgacgctggcggtatcagcgtcggtgaccgctggaaggcgctggctaacgcgctcaatattccgctggatcagcttagtgcccgcattaacgccaacccgaaagggcgctttatttatctggcgcgtcaggtgaaccctgacatggcggactacatcaaaaaactgaaactgccggggattcatctgcgtgaagagtctcgccgttactatccgtccggcgaagtgactgctcacctcatcggctttactaacgtcgatagtcaagggattgagggcgttgagaagagtttcgataaatggcttaccgggcagccgggtgagcgcattgtgcgtaaagaccgctatggtcgcgtaattgaagatatttcttctactgacagccaggcagcgcacaacctggcgctgagtattgatgaacgcctgcaggcgctggtttatcgcgaactgaacaacgcggtggcctttaacaaggctgaatctggtagcgccgtgctggtggatgtcaacaccggtgaagtgctggcgatggctaacagcccgagttacaaccctaacaatctgagcggcacgccgaaagaggcgatgcgtaaccgtaccatcaccgacgtgtttgaaccgggcagtacggttaaaccgatggtggtaatgaccgcgttgcaacgtggcgtggtgcgggaaaacagcgtactcaataccattccttatcgaattaacggccacgaaatcaaagacgtggcacgctacagcgaattaaccctgaccggggtattacagaagagcagtaacgtcggtgtttccaagctggcgttagcgatgccgtccagtgcgttagtagatacttacagtcgttttggactgggaaaagcgaccaatttggggttggtcggagaacgcagtggcttatatcctcaaaaacaacggtggtctgacatagagagggccaccttctctttcggctacgggctaatggtaacaccattacagttagcgcgagtctacgcaactatcggcagctacggcatttatcgcccactgagcattaccaaagttgaccccccggttcccggtgaacgtgtcttcccggaatccattgtccgcactgtggtgcatatgatggaaagcgtggcgctaccaggcggcggcggcgtgaaggcggcgattaaaggctatcgtatcgccattaaaaccggtaccgcgaaaaaggtcgggccggacggtcgctacatcaataaatatattgcttataccgcaggcgttgcgcctgcgagtcagccgcgcttcgcgctggttgttgttatcaacgatccgcaggcgggtaaatactacggcggcgccgtttccgcgccggtctttggtgccatcatgggcggcgtattgcgtaccatgaacatcgagccggatgcgctgacaacgggcgataaaaatgaatttgtgattaatcaaggcgaggggacaggtggcagaagctaaagcctgagcgcttcgcgctggttgttgttatcaacgatccgcaggcgggtaaatactacggcggcgccgtttccgcgccggtctttggtgccatcatgggcggcgtattgcgtaccatgaacatcgagccggatgcgctgacaacgggcgataaaaatgaatttgtgattaatcaaggcgaggggacaggtggcagatcgtaatttgcgcgaccttcttgctccgtgggtgccagacgcacctagccgagcactgcgagagatgacactcgacagccgtgtggctgcggcgggcgatctctttgtagctgtagtaggtcatcaggcggacgggcgtcgatatatcccgcaggcgatagcgcaaggtgtggctgccattattgcagaggcgaaagatgaggcgaccgatggtgaaatccgtgaaatgcacggcgtaccggtcatctatctcagccagctcaacgagcgtttatctgcactggcgggccgcttttaccatgaaccctctgacaatttacgtctcgtgggcgtaacgggcaccaacggcaaaaccacgactacccagctgttggcgcagtggagccaactgcttggcgaaatcagcgcggtaatgggcaccgttggtaacggcctgctggggaaagtgatcccgacagaaaatacaaccggtagcgcagtcgatgttcagcatgagctggcggggctggtggatcagggcgcgacgttttgcgcaatggaagtttcctcccacgggctggtacagcaccgtgtggcggcattgaaatttgcggcgagcgtctttaccaacttaagccgcgatcaccttgattatcatggtgatatggaacactacgaagccgcgaaatggctgctttattctgagcatcattgcggtcaggcgattattaacgccgacgatgaagtgggccgccgctggctggcaaaactgccggacgcggttgcggtaagtatggaagatcatattaatccgaactgtcacggacgctggttgaaagcgaccgaagtgaactatcacgacagcggtgcgacgattcgctttagcagtagttggggcgatggcgaaattgaaagccatctgatgggcgcttttaacgtcagcaacctgctgctcgcgctggcgacactgttggcactcggctatccactggctgatctgctgaaaaccgccgcgcgtctgcaaccggtttgcggacgtatggaagtgttcactgcgccaggcaaaccgacggtggtggtggattacgcgcatacgccggatgcactggaaaaagccttacaggcggcgcgtctgcactgtgcgggcaagctgtggtgtgtctttggctgtggtggcgatcgcgataaaggtaagcgtccactgatgggcgcaattgccgaagagtttgctgacgtggcggtggtgacggacgataacccgcgtaccgaagaaccgcgtgccatcatcaacgatattctggcgggaatgttagatgccggacatgccaaagtgatggaaggccgtgctgaagcggtgacttgcgccgttatgcaggctaaagagaatgatgtggtactggtcgcgggcaaaggccatgaagattaccagattgttggcaatcagcgtctggactactccgatcgcgtcacggtggcgcgtctgctgggggtgattgcatgattagcgtaacccttagccaacttaccgacattctcaacggtgaactgcaaggtgcagatatcacccttgatgctgtaaccactgatacccgaaaactgacgccgggctgcctgtttgttgccctgaaaggcgaacgttttgatgcccacgattttgccgaccaggcgaaagctggcggcgcaggcgcactactggttagccgtccgctggacatcgacctgccgcagttaatcgtcaaggatacgcgtctggcgtttggtgaactggctgcatgggttcgccagcaagttccggcgcgcgtggttgctctgacggggtcctccggcaaaacctccgttaaagagatgacggcggcgattttaagccagtgcggcaacacgctttatacggcaggcaatctcaacaacgacatcggtgtaccgatgacgctgttgcgcttaacgccggaatacgattacgcagttattgaacttggcgcgaaccatcagggcgaaatagcctggactgtgagtctgactcgcccggaagctgcgctggtcaacaacctggcagcggcgcatctggaaggttttggcagccttgcgggtgtcgcgaaagcgaaaggtgaaatctttagcggcctgccggaaaacggtatcgccattatgaacgccgacaacaacgactggctgaactggcagagcgtaattggcagtcgcaaagtgtggcgtttcagtcccaatgccgccaacagcgatttcaccgccaccaatatccatgtgaccagccacggtacggaatttaccctacaaaccccaaccggtagcgtcgatgttctgctgccgttgccggggcgtcacaatattgcgaatgcgctggcagccgctgcgctctccatgtccgtgggcgcaacgcttgatgctatcaaagcggggctggcaaatctgaaagctgttccaggccgtctgttccccatccaactggcagaaaaccagttgctgctcgacgactcctacaacgccaatgtcggtagtatgactgcagcagtccaggtactggctgaaatgccgggctaccgcgtgctggtggtgggcgatatggcggaactgggcgctgaaagcgaagcctgccatgtacaggtgggcgaggcggcaaaagctgctggtattgaccgcgtgttaagcgtgggtaaacaaagccatgctatcagcaccgccagcggcgttggcgaacattttgctgataaaactgcgttaattacgcgtcttaaattactgattgctgagcaacaggtaattacgattttagttaagggtagtcgtagtgccgccatggaagaggtagtacgcgctttacaggagaatgggacatgttaatataagctttacaggagaatgggacatgttagtttggctggccgaacatttggtcaaatattattccggctttaacgtcttttcctatctgacgtttcgcgccatcgtcagcctgctgaccgcgctgttcatcagtttgtggatgggcccgcgtatgattgctcatttgcaaaaactttcctttggtcaggtggtgcgtaacgacggtcctgaaagtcacttcagcaagcgcggtacgccgaccatgggcgggattatgatcctgacggcgattgtgatctccgtactgctgtgggcttacccgtccaatccgtacgtctggtgcgtgttggtggtgctggtaggttacggtgttattggctttgttgatgattatcgcaaagtggtgcgtaaagacaccaaagggttgatcgctcgttggaagtatttctggatgagcgtcattgcgctgggtgtcgccttcgccctgtaccttgccggcaaagacacgcccgcaacgcagctggtggtcccattctttaaagatgtgatgccgcagctggggctgttctacattctgctggcttacttcgtcattgtgggtactggcaacgcggtaaacctgaccgatggtctcgacggcctggcaattatgccgaccgtatttgtcgccggtggttttgcgctggtggcgtgggcgaccggcaatatgaactttgccagctacttgcatataccgtatctgcgacacgccggggaactggttattgtctgtaccgcgatagtcggggcaggactgggcttcctgtggtttaacacctatccggcgcaggtctttatgggcgatgtaggtagcctggcgttaggtggtgcgttaggcattatcgccgtactgctacgtcaggaattcctgctggtgattatggggggcgtgttcgtggtagaaacgctttctgtcatcctgcaggtcggctcctttaaactgcgcggacaacgtattttccgcatggcaccgattcatcaccactatgaactgaaaggctggccggaaccgcgcgtcattgtgcgtttctggattattagcctgatgctggttctgattggtctggcaacgctgaaggtacgttaatcatggctgattatcagggtaaaaatgtcgtcattatcggcctgggcctcaccgggctttcctgcgtggactttttcctcgctcgcggtgtgacgccgcgcgttatggatacgcgtatgacaccgcctggcctggataaattacccgaagccgtagaacgccacacgggcagtctgaatgatgaatggctgatggcggcagatctgattgtcgccagtcccggtattgcactggcgcatccatccttaagcgctgccgctgatgccggaatcgaaatcgttggcgatatcgagctgttctgtcgcgaagcacaagcaccgattgtggcgattaccggttctaacggcaaaagcacggtcaccacgctagtgggtgaaatggcgaaagcggcgggggttaacgttggtgtgggtggcaatattggcctgcctgcgttgatgctactggatgatgagtgtgaactgtacgtgctggaactgagcagcttccagctggaaaccacctccagcttacaggcggtagcagcgaccattctgaacgtgactgaagatcatatggatcgctatccgtttggtttacaacagtatcgtgcagcaaaactgcgcatttacgaaaacgcgaaagtttgcgtggttaatgctgatgatgccttaacaatgccgattcgcggtgcggatgaacgctgcgtcagctttggcgtcaacatgggtgactatcacctgaatcatcagcagggcgaaacctggctgcgggttaaaggcgagaaagtgctgaatgtgaaagagatgaaactttccgggcagcataactacaccaatgcgctggcggcgctggcgctggcagatgctgcagggttaccgcgtgccagcagcctgaaagcgttaaccacattcactggtctgccgcatcgctttgaagttgtgctggagcataacggcgtacgttggattaacgatagcaaagcgaccaacgtcggcagtacggaagcggcgctgaatggcctgcacgtagacggcacactgcatttgttgctgggtggcgatggtaaaagcgcggactttagcccactggcgcgttacctgaatggcgataacgtacgtctgtattgtttcggtcgtgacggcgcgcagctggcggcgctacgtccggaagtggcagaacaaaccgaaactatggaacaggcgatgcgcttgctggctccgcgtgttcagccgggcgatatggttctgctctccccagcctgtgccagccttgatcagttcaagaactttgaacaacgaggcaatgagtttgcccgtctggcgaaggagttaggttgatgcgtttatctctccctcgcctgaaaatgccgcgcctgccaggattcagtatcctggtctggatctccacggcgctaaagggctgggtgatgggcagccgggaaaaagataccgacagcctgatcatgtacgatcgcaccttactgtggctgaccttcggcctcgcggcgattggctttatcatggtgaccagcgcgagtatgcccatagggcaacgcttaaccaacgatccgttcttcttcgcgaagcgtgatggtgtctatctgattttggcgtttattctggcgatcattacgctgcgtctgccgatggagttctggcaacgctacagtgccacgatgctgctcggatctatcatcctgctgatgatcgtcctggtagtgggtagcagcgttaaaggggcaagccgttggatcgatctcggtttgctgcgtatccagcctgcggagctgacaaaactgagcctgttttgctatatcgccaactatctggtgcgtaaaggcgacgaagtacgtaataacctgcgcggcttcctgaaaccgatgggcgtgattctggtgttggcagtgttactgctggcacagccagaccttggtacggtggtggtgttgtttgtgactacgctggcgatgttgttcctggcgggagcgaaattgtggcagttcattgccattatcggtatgggcattagtgcggttgtgttgctgatactcgccgaaccgtaccgtatccgccgtgttaccgcattctggaacccgtgggaagatccctttggcagcggctatcagttaacgcaaagcctgatggcgtttggtcgcggcgaactttgggggcaaggtttaggtaacagcgtacaaaaactggagtatctgccggaagcgcacactgactttattttcgccattatcggcgaagaactggggtatgtcggtgtggtgctggcacttttaatggtattcttcgtcgcttttcgcgcgatgagcattggccgtaaagcattagaaattgaccaccgtttttccggttttctcgcctgttctattggcatctggtttagcttccaggcgctggttaacgtaggcgcggcggcggggatgttaccgaccaaaggtctgacattgccgctgatcagttacggtggtagcagcttactgattatgagcacagccatcatgatgctgttgcgtattgattatgaaacgcgtctggagaaagcgcaggcgtttgtacgaggtagtcgatgagtggtcaaggaaagcgattaatggtgatggcaggcggaaccggtggacatgtattcccgggactggcggttgcgcaccatctaatggctcagggttggcaagttcgctggctggggactgccgaccgtatggaagcggacttagtgccaaaacatggcatcgaaattgatttcattcgtatctctggtctgcgtggaaaaggtataaaagcactgatagctgccccgctgcgtatcttcaacgcctggcgtcaggcgcgggcgattatgaaagcgtacaaacctgacgtggtgctcggtatgggaggctacgtgagtggtccaggtggtctggccgcgtggagcttaggcattccggttgtacttcatgaacaaaacggtattgcgggcttaaccaataaatggctggcgaagattgccaccaaagtgatgcaggcgtttccaggtgctttccctaatgcggaagtagtgggtaacccggtgcgtaccgatgtgttggcgctgccgttgccgcagcaacgtttggctggacgtgaaggtccggttcgtgtgctggtagtgggtggttctcagggcgcacgcattcttaaccagacaatgccgcaggttgctgcgaaactgggtgatagtgtcactatctggcatcagagcggcaaaggtagccaacaatccgttgaacaggcgtatgccgaagcggggcaaccgcagcataaagtgacggaatttattgatgatatggcggcggcgtatgcgtgggcggatgtcgtcgtttgccgctccggtgcgttaacggtgagtgaaatcgccgcggcaggactaccggcgttgtttgtgccgtttcaacataaagaccgccagcaatactggaatgcgctaccgctggaaaaagcgggcgcagccaaaattatcgagcagccacagcttagcgtggatgctgtcgccaacaccctggccgggtggagccgagaaaccttattaaccatggcagaacgcgcccgcgctgcatccattccggatgccaccgagcgagtggcaaatgaagtgagccgggttgcccgggcgtaattgtagcgatgccttttgcatcgtatgaatttaagaagttaatggcgtaaagaatgaatacacaacaattggcaaaactgcgttccatcgtgcccgaaatgcgtcgcgttcggcacatacattttgtcggcattggtggtgccggtatgggcggtattgccgaagttctggccaatgaaggttatcagatcagtggttccgatttagcgccaaatccggtcacgcagcagttaatgaatctgggtgcgacgatttatttcaaccatcgcccggaaaacgtacgtgatgccagcgtggtcgttgtttccagcgcgatttctgccgataacccggaaattgtcgccgctcatgaagcgcgtattccggtgatccgtcgtgccgaaatgctggctgagttaatgcgttttcgtcatggcatcgccattgccggaacgcacggcaaaacgacaaccaccgcgatggtttccagcatctacgcagaagcggggctcgacccaaccttcgttaacggcgggctggtaaaagcggcgggggttcatgcgcgtttggggcatggtcggtacctgattgccgaagcagatgagagtgatgcaagcttcctgcatctgcaaccgatggtggcgattgtcaccaatatcgaagccgaccacatggatacctaccagggcgactttgagaatttaaaacagacttttattaattttctgcacaacctgccgttttacggtcgtgcggtgatgtgtgttgatgatccggtgatccgcgaattgttaccgcgagtggggcgtcagaccacgacttacggcttcagcgaagatgccgacgtgcgtgtagaagattatcagcagattggcccgcaggggcactttacgctgctgcgccaggacaaagagccgatgcgcgtcaccctgaatgcgccaggtcgtcataacgcgctgaacgccgcagctgcggttgcggttgctacggaagagggcattgacgacgaggctattttgcgggcgcttgaaagcttccaggggactggtcgccgttttgatttcctcggtgaattcccgctggagccagtgaatggtaaaagcggtacggcaatgctggtcgatgactacggccaccacccgacggaagtggacgccaccattaaagcggcgcgcgcaggctggccggataaaaacctggtaatgctgtttcagccgcaccgttttacccgtacgcgcgacctgtatgatgatttcgccaatgtgctgacgcaggttgataccctgttgatgctggaagtgtatccggctggcgaagcgccaattccgggagcggacagccgtagcctgtgtcgcacaattcgtggacgtgggaaaattgatcccattctggtgccggatccggcgcgggtagccgagatgctggcaccggtattaaccggtaacgacctgattctcgttcagggggctggtaatattggaaaaattgcccgttctttagctgaaatcaaactgaagccgcaaactccggaggaagaacaacatgactgataaaatcgcggtcctgttgggtgggacctccgctgagcgggaagtttctctgaattctggcgcagcggtgttagccggactgcgtgaaggcggtattgacgcgtatcctgtcgacccgaaagaagtcgacgtgacgcaactgaagagcatgggctttcagaaagtgtttatcgcgctacacggtcgcggcggtgaagatggtacgctgcaggggatgctcgagctgatgggcttgccttataccggaagcggagtgatggcatctgcgcttagtatggataaactacgcagcaaacttctatggcaaggtgccggtttaccggtcgcgccgtgggtagcgttaacccgcgcagagtttgaaaaaggcctgagcgataagcagttagcagaaatttctgctctgggtttgccggttatcgttaagccgagccgcgaaggttccagtgtgggaatgagtaaagtagtagcagaaaatgctctacaagatgcattaagattggcatttcagcacgatgaagaagtattgattgaaaaatggctaagtgggccggagttcacggttgcgatactcggtgaagaaattttaccgagtatacgtattcaaccgtccggaaccttctatgattatgaggcgaagtatctctctgatgagacacagtatttctgccccgcaggtctggaagcgagtcaagaggccaatttgcaggcattagtgctgaaagcatggacgacgttaggttgcaaaggatggggacgtattgacgttatgctggacagcgatggacagttttatctgctggaagccaataccagtccgggtatgaccagccacagcctggtgccgatggcggcacgtcaggcaggtatgagcttcagccagttggtagtacgaattctggaactggcggactaatatgagccaggctgctctgaacacgcgaaacagcgaagaagaggtttcttctcgccgcaataatggaacgcgtctggcggggatccttttcctgctgaccgttttaacgacagtgttggtgagcggctgggtcgtgttgggctggatggaagatgcgcaacgcctgccgctcagtaagctggtgttgaccggtgaacgccattacacacgtaatgacgatatccggcagagcatcctggcattgggtgagccgggtacctttatgacccaggatgtcaacatcatccagacgcaaatagaacaacgcctgccgtggattaagcaggtgagcgtcagaaagcagtggcctgatgaattgaagattcatctggttgaatatgtgccgattgcgcggtggaatgatcaacatatggtagacgcggaaggaaataccttcagcgtgccgccagaacgcaccagcaagcaggtgcttccaatgctgtatggcccggaaggcagcgccaatgaagtgttgcagggctatcgcgaaatggggcagatgctggcaaaggacagatttactctgaaggaagcggcgatgaccgcgcggcgttcctggcagttgacgctgaataacgatattaagctcaatcttggccggggcgatacgatgaaacgtttggctcgctttgtagaactttatccggttttacagcagcaggcgcaaaccgatggcaaacggattagctacgttgatttgcgttatgactctggagcggcagtaggctgggcgcccttgccgccagaggaatctactcagcaacaaaatcaggcacaggcagaacaacaatgatcaaggcgacggacagaaaactggtagtaggactggagattggtaccgcgaaggttgccgctttagtaggggaagttctgcccgacggtatggtcaatatcattggcgtgggcagctgcccgagccgtggtatggataaaggcggggtgaacgacctcgaatccgtggtcaagtgcgtacaacgcgccattgaccaggcagaattgatggcagattgtcagatctctagcgtatatctggcgctttctggtaagcacatcagctgccagaatgaaattggtatggtgcctatttctgaagaagaagtgacgcaagaagatgtggaaaacgtcgtccataccgcgaaaagcgtgcgtgtgcgcgatgagcatcgtgtgctgcatgtgatcccgcaagagtatgcgattgactatcaggaagggatcaagaatccggtaggacttagcggcgtgcggatgcaggcaaaagtgcacctgatcacatgtcacaacgatatggcgaaaaacatcgtcaaagcggttgaacgttgtgggctgaaagttgaccaactgatatttgccggactggcaagtagttatagcgtattgacggaagatgaacgtgaactgggtgtctgcgtcgtcgatatcggtggtggtacaatggatatcgccgtttataccggtggggcattgcgccacactaaggtaattccttatgctggcaatgtcgtgaccagtgatatcgcttacgcctttggcacgccgccaagcgacgccgaagcgattaaagttcgccacggttgtgcgctgggttccatcgttggaaaagatgagagcgtggaagtgccgagcgtaggtggtcgtccgccacggagtctgcaacgtcagacactggcagaggtgatcgagccgcgctataccgagctgctcaacctggtcaacgaagagatattgcagttgcaggaaaagcttcgccaacaaggggttaaacatcacctggcggcaggcattgtattaaccggtggcgcagcgcagatcgaaggtcttgcagcctgtgctcagcgcgtgtttcatacgcaagtgcgtatcggcgcgccgctgaacattaccggtttaacggattatgctcaggagccgtattatagcacggcggtgggattgcttcactatgggaaagagagtcatcttaacggtgaagctgaagtagaaaaacgtgttacagcaagtgttggcagctggatcaagcgactcaatagttggctgcgaaaagagttttaatttttatgaggccgacgatgattacggcctcaggcgacaggcacaaatcggagagaaactatgtttgaaccaatggaacttaccaatgacgcggtgattaaagtcatcggcgtcggcggcggcggcggtaatgctgttgaacacatggtgcgcgagcgcattgaaggtgttgaattcttcgcggtaaataccgatgcacaagcgctgcgtaaaacagcggttggacagacgattcaaatcggtagcggtatcaccaaaggactgggcgctggcgctaatccagaagttggccgcaatgcggctgatgaggatcgcgatgcattgcgtgcggcgctggaaggtgcagacatggtctttattgctgcgggtatgggtggtggtaccggtacaggtgcagcaccagtcgtcgctgaagtggcaaaagatttgggtatcctgaccgttgctgtcgtcactaagcctttcaactttgaaggcaagaagcgtatggcattcgcggagcaggggatcactgaactgtccaagcatgtggactctctgatcactatcccgaacgacaaactgctgaaagttctgggccgcggtatctccctgctggatgcgtttggcgcagcgaacgatgtactgaaaggcgctgtgcaaggtatcgctgaactgattactcgtccgggtttgatgaacgtggactttgcagacgtacgcaccgtaatgtctgagatgggctacgcaatgatgggttctggcgtggcgagcggtgaagaccgtgcggaagaagctgctgaaatggctatctcttctccgctgctggaagatatcgacctgtctggcgcgcgcggcgtgctggttaacatcacggcgggcttcgacctgcgtctggatgagttcgaaacggtaggtaacaccatccgtgcatttgcttccgacaacgcgactgtggttatcggtacttctcttgacccggatatgaatgacgagctgcgcgtaaccgttgttgcgacaggtatcggcatggacaaacgtcctgaaatcactctggtgaccaataagcaggttcagcagccagtgatggatcgctaccagcagcatgggatggctccgctgacccaggagcagaagccggttgctaaagtcgtgaatgacaatgcgccgcaaactgcgaaagagccggattatctggatatcccagcattcctgcgtaagcaagctgattaagaattgactggaatttgggtttcgaggctctttgtgctaaactggcccgccgaatgtatagtacacttcggttggataggtaatttggcgagataatacgatgatcaaacaaaggacacttaaacgtatcgttcaggcgacgggtgtcggtttacataccggcaagaaagtcaccctgacgttacgccctgcgccggccaacaccggggtcatctatcgtcgcaccgacttgaatccaccggtagatttcccggccgatgccaaatctgtgcgtgataccatgctctgtacgtgtctggtcaacgagcatgatgtacggattagtaccgtagagcacctcaatgctgctctcgcgggcttgggcatcgataacattgttatcgaagttaacgcgccggaaatcccgatcatggacggcagcgccgctccgtttgtatacctgctgcttgacgccggtatcgacgagttgaactgcgccaaaaaatttgttcgcatcaaagagactgttcgtgtcgaagatggcgataagtgggctgaatttaagccgtacaatggttttagcctggatttcaccatcgattttaaccatccggctattgattccagcaaccagcgctatgcgatgaacttctccgctgatgcgtttatgcgccagatcagccgtgcgcgtacgttcggtttcatgcgtgatatcgaatatctgcagtcccgtggtttgtgcctgggcggcagcttcgattgtgccatcgttgttgacgattatcgcgtactgaacgaagacggcctgcgttttgaagacgaatttgtgcgtcacaaaatgctcgatgcgatcggtgacttgttcatgtgtggtcacaatattattggtgcatttaccgcttataaatccggtcatgcactgaataacaaactgctgcaggctgtcctggcgaaacaggaagcctgggaatatgtgaccttccaggacgacgcagaactgccgttggccttcaaagcgcctagtgctgtactggcataacgacatttatactgtcgtataaaattcgactggcaaatctggcactctctccggccaggtgaaccagtcgtttttttttgaattttataagagctataaaaaacggtgcgaacgctgttttcttaagcacttttccgcacaacttatcttcattcgtgctgtggactgcaggctttaatgataagatttgtgcgctaaatacgtttgaatatgatcgggatggcaataacgtgagtggaatactgacgcgctggcgacagtttggtaaacgctacttctggccgcatctcttattagggatggttgcggcgagtttaggtttgcctgcgctcagcaacgccgccgaaccaaacgcgcccgcaaaagcgacaacccgcaaccacgagcctagtgccaaagttaactttggtcaattggccttgctggaagcgaacacacgccgcccgaatagcaactattccgttgattactggcatcaacatgccattcgcacggtaatccgtcatctttctttcgcaatggcaccgcaaacactgcccgttgctgaagaatctttgcctcttcaggcgcaacatcttgcattactggatacgctcagcgcgctgctgacccaggaaggcacgccgtctgaaaagggttatcgcattgattatgcgcattttaccccacaagcaaaattcagcacgcccgtctggataagccaggcgcaaggcatccgtgctggccctcaacgcctcacctaacaacaataaacctttacttcattttattaactccgcaacgcggggcgtttgagattttattatgctaatcaaattgttaactaaagttttcggtagtcgtaacgatcgcaccctgcgccggatgcgcaaagtggtcaacatcatcaatgccatggaaccggagatggaaaaactctccgacgaagaactgaaagggaaaaccgcagagtttcgtgcacgtctggaaaaaggcgaagtgctggaaaatctgatcccggaagctttcgccgtggtacgtgaggcaagtaagcgcgtctttggtatgcgtcacttcgacgttcagttactcggcggtatggttcttaacgaacgctgcatcgccgaaatgcgtaccggtgaaggaaaaaccctgaccgcaacgctgcctgcttacctgaacgcactaaccggtaaaggcgtgcacgtagttaccgtcaacgactacctggcgcaacgtgacgccgaaaacaaccgtccgctgtttgaattccttggcctgactgtcggtatcaacctgccgggcatgccagcaccggcaaagcgcgaagcttacgcagctgacatcacttacggtacgaacaacgaatacggctttgactacctgcgcgacaacatggcgttcagccctgaagaacgtgtacagcgtaaactgcactatgcgctggtggacgaagtggactccatcctgatcgatgaagcgcgtacaccgctgatcatttccggcccggcagaagacagcagcgaaatgtataaacgcgtgaataaaattattccgcacctgatccgtcaggaaaaagaagactccgaaaccttccagggcgaaggccacttcagcgtggacgaaaaatctcgccaggtgaacctgaccgaacgtggtctggtgctgattgaagaactgctggtgaaagagggcatcatggatgaaggggagtctctgtactctccggccaacatcatgctgatgcaccacgtaacggcggcgctgcgcgctcatgcgctgtttacccgtgacgtcgactacatcgttaaagatggtgaagttatcatcgttgacgaacacaccggtcgtaccatgcagggccgtcgctggtccgatggtctgcaccaggctgtggaagcgaaagaaggtgtgcagatccagaacgaaaaccaaacgctggctagcatcaccttccagaactacttccgtctgtatgaaaaactggcggggatgaccggtactgctgataccgaagctttcgaatttagcagtatctacaagctggataccgtcgttgttccgaccaaccgtccaatgattcgtaaagatctgccggacctggtctacatgactgaagcggaaaaaattcaggcgatcattgaagatatcaaagaacgtactgcgaaaggccagccggtgctggtgggtactatctccatcgaaaaaagcgagctggtgagtaacgaactgaccaaagccggtattaagcacaacgtcctgaacgccaaattccacgccaacgaagcggcgattgttgctcaggcaggttatccggctgcggtgactatcgcgaccaatatggcgggtcgtggtacagatattgtgctcggtggtagctggcaggcagaagttgccgcgctggaaaatccgaccgcagagcaaattgaaaaaattaaagccgactggcaggtacgtcacgatgcggtactggaagcaggtggcctgcatatcatcggtaccgagcgtcacgaatcccgtcgtatcgataaccagttgcgcggtcgttctggtcgtcagggggatgctggttcttcccgtttctacctgagcatggaagatgcgctgatgcgtatttttgcttccgaccgagtatccggcatgatgcgtaaactgggtatgaagccaggcgaagccattgaacacccgtgggtgactaaagcgattgccaacgcccagcgtaaagttgaaagccgtaacttcgacattcgtaagcaactgctggaatatgatgacgtggctaacgatcagcgtcgcgccatttactcccagcgtaacgaactgttggatgtcagcgatgtgagcgaaaccattaacagcattcgtgaagatgtgttcaaagcgaccattgatgcctacattccaccacagagcctggaagaaatgtgggatattccggggctgcaggaacgtctgaagaacgatttcgacctcgatttgccaattgccgagtggctggataaagaaccagaactgcatgaagagacgctgcgtgagcgcattctggcgcagtccatcgaagtgtatcagcgtaaagaagaagtggttggtgctgagatgatgcgtcacttcgagaaaggcgtcatgctgcaaacgcttgactccctgtggaaagagcacctggcagcgatggactatctgcgtcagggtatccacctgcgtggctacgcacagaaagatccgaagcaggaatacaaacgtgaaagcttctccatgtttgcagcgatgctggagagcttgaaatatgaagttatcagtacgctgagcaaagttcaggtacgtatgcctgaagaggttgaggagctggaacaacagcgtcgtatggaagccgagcgtttagcgcaaatgcagcagcttagccatcaggatgacgactctgcagccgcagctgcactggcggcgcaaaccggagagcgcaaagtaggacgtaacgatccttgcccgtgcggttctggtaaaaaatacaagcagtgccatggccgcctgcaataaaagctaactgttgaagtaaaaggcgcaggattctgcgccttttttataggtttaagacaatgaaaaagctgcaaattgcggtaggtattattcgcaacgagaacaatgaaatctttataacgcgtcgcgcagcagatgcgcacatggcgaataaactggagtttcccggcggtaaaattgaaatgggtgaaacgccggaacaggcggtggtgcgtgaacttcaggaagaagtcgggattaccccccaacattttagcctatttgaaaaactggaatatgaattcccggacaggcatataacactgtggttttggctggtcgaacgctgggaaggggagccgtggggtaaagaagggcaacccggtgagtggatgagcctggtcggtcttaatgccgatgattttccgccagccaatgaaccggtaattgcgaagcttaaacgtctgtaagtcagataaggcgttttcgccgcatccgacattcgcacacgatgcctgatgcgacgctggcgcgtcttatcaggcctaaagggatttctaactcattgataaatttgtttttgtaggtcggataaggcgttcacgccgcatccgacatttgcacaagatgcctgatgcgacgctgtccgcgtcttatcaggcctacgtgcggcatcagacaaatgtcactgctttggttcttcgctccagtcatcgctttcggaaagatcgccactgctggggattcgtttttcttcagcagcccattctccgaggtcgatcagctgacaacgtttggagcaaaatggccgaaacgggctgatttcaccccacaccaccgttttcccgcaggttgggcaattcaccgtaatagtttcactcatttttactccttagcaacaggccagttcgaaatccagacgttccggtacctgtccgttttcagtgtccagcggcataaaacgaatggcaaaacggctcttatgtccggaaatttgcggataaagctgactatcgaggctcagattcaggcgcagcaagtcggcatcgccaccgttatcctgataaaaaccattcaggctggtttgtttacggaagggggcgctctggcgaattaaatccagcaccatggtaagtgcctgggtgagcgggttcaggctggcaatccaggtttctacctggctgtcgcgctgcgcctggggtagatgcagccaaatgtgcaatgtaggtaaatcaaagctgcaacagccgcctgggatgctcagtcgctgacgcaccagagcaatcaaacgatcttcacgcagaaattgcccgatacgcggcgcggaaattaatacgctccccgccgcttttaactgctgaattaatgcttcaatacggctctggtccacgccaggcacgccaatccaggtctggagtttacgttgctgccggtcaagttctttcaacagctcagtgcggacttcgccgcgctcgaaaacatccagtaattcactgacattacggaagaaatgcagcgcgccagcgtggtcaacgatgggtaaattaacggtgagttgctgaatcaaaaactcaatgcgcagccatgtacgcattttttcatttagtggatgttcaaaaaggacctgggtctgcattacggtttttcctgactgacaaactggctcgcaagctgcaaatagtgtgcgtgcaggcgggcaacatcgcttgcgatagcatccggtgcgccgttattatcaatgacgtcatctgccacggcaaggcgggcttcgcgcgttgcctgagcagcaaggatttgttcgacatgctcgcgagttacatcatcgcgctgcatggtgcgcttaagttgcgtttctgggctgacatccaccacaagcactcgattcgcttttttatacagactgttttctaccagcaatggcacaacccacagtacatagggggaagtagcttgctggatctggtgttgcgtctcttgctgaatcagcggatgcagcagggcgttaagccagtttttctcttccgggttggcgaagatccgctcgcgcaaggcccggcgctgcaatgttccatcagcagcaatcatgttagcgccaaagtgatcagcaatggcatgtagcgcaggtgcacctggttcaaccacctgacgcgcaataatatcggcatcaatgacgttaattccgagatcagcaaacgcattggcaacggtactcttgccactgccaatgcctcccgttaaggcaactatatacctcataatttatattcccgggaattcatcatgattatcaaaacgttaaaaatgagtgcacgaaagcgaaattgatgaaacgttcgctcactatttaccaggtaaatttatgggattgtagcgtaaaaaaagacaatttcgcagtcttgcgccgcattgattagtgcgtatgatagcgtcactggagttgcgctcttacccttatagccattaaccccaggaatccgcacatgcgtattgaagaagatctgaagttaggttttaaagacgttctcatccgccctaaacgctccactcttaaaagccgttccgatgttgaactggaacgtcaattcaccttcaaacatagtggtcagagctggtccggcgtgccgattatcgccgcaaatatggacaccgtaggcacattttctatggcctctgcgctggcttcttttgatattttgactgctgtgcataaacactattctgtcgaagagtggcaagcgtttatcaacaattcttccgctgatgtgctgaaacatgtgatggtttctaccggtacgtctgatgcggatttcgaaaaaactaaacagattctcgacctgaacccggcattaaacttcgtttgtattgacgtggcgaatggttattccgaacacttcgtgcagttcgttgcgaaagcgcgtgaagcgtggccgaccaaaaccatttgtgctggtaacgtagtgactggtgaaatgtgtgaggagcttatcctcagtggtgccgatatcgttaaagttggcattggcccaggttctgtttgtacaactcgcgtcaaaacaggcgtcggttatccgcaactttctgcggtaatcgaatgtgccgatgctgcgcacggtctgggcggaatgatcgtcagcgatggtggctgcaccacgccgggcgatgtggcgaaagcctttggcggcggtgccgatttcgtcatgcttggcggcatgctggcgggccacgaagagagcggcggtcgcatcgttgaggagaacggcgagaaatttatgctgttctacggcatgagctccgagtctgcgatgaaacgtcacgttggcggcgttgcggaatatcgcgcagcagaaggtaaaaccgttaagctgccgctgcgaggcccggttgaaaataccgcgcgagatattttgggcggcctgcgtagtgcttgtacatacgttggggctagtcgcctgaaagagctgaccaagcgcaccacgtttattcgtgtgcaggaacaagaaaaccgcatcttcaacaacctgtaatctcccaacgctggcgtggagcaacacgccagcgttatcccatcccactcatcgcatcgcctaaatggaaaattggcagatacattgccaccaccagcgtaccaataattcctcccgttatgatcagcaacgccggttccagtaaggctgcgaggttatccgccagcgccattgtgttttcccgatgatgatgggcgaggttgtctaacatgagatccagagagccggatgcctctcctgttctcactaattgcaaacagagcgggctaaactcaccggtattttttagcgccagccagatgggttgaccgttactgatatcgtgctggatttgtgtcagaagttgcacccagtacgggcagcgcattgtttctctgacgctctctacgccctgtaaaaaagtaatgcctgcactttgtgtcagcgccagaatcgtaaagatctgcgtgagtttttgtccccgcatcagactacccataatcgggatgcgtaacagcaatttctgccgcactataagccaggtcggtcggcgcatcagcaacttattggctatcgccagcagaaagccgaacaacaccagcagccagctccattcgccactaaagtctgccagcgtcatgatcccctgcgttagtgccggtagtggggtgttgaaggtcttatagatagcggcaaactccggcagaacaaaatgcagcattgccacaaccaccatgattgccatcgctaaaatgatgatgggataacgtaacgcacttttcactttgtcggtcaactgacgctgggctttttgctgacgcgccagttcaaagcagcattcatccagcttaccggtcagttcacccgtgcggatcatcgcctgatagagcggcggaaatacctcactccagggtaataaggcattggaaaaagcaatgccctgttcgagatcgtgcgccaggctttgcagcaacgcttgccattgcttactgggatgctgttccgccagcagagccagcccttcagaaagcgttaaccctgctttgagtagcgtcgccagttgatgaatgacttccgcgcttttatctcctcgccactgcgcagaattgatggcgattcgcttcaggcttagtggggtaaccatctgttgctgtagtgccataagcagtaaagtacggctctctgcccatagcatcccatcttgcgcattgccgtcgccggttatgccatgccagcgccagagttgcttactcgccatgcggcatccccagtacgcggattaactcttcaaaggtggttaagccttgctctacggccaggcagccgttttcaaaaagcgtacgcatacccgcctgtcgtgcgtgcgtttccaggctttcaacgtcggtattagcggaaataagctgacgaatgaccggcgttatgggcagaacttcaaataaggccgtacgaccataaaaaccgtggtagcaatgtacacaaccgggtgcctgccagtggggcagcgggcttggccatacattgtctggaatgtggatgggctccccttgctgccggcgacaatgtgggcaaagtttgcgtaccagacgctgggctattaccagcgtaagcgcgctacttagcatccagcgggcgacccccatttgctgtaaacgtaccagcgtttcgcaggtggaattagtgtgtagggtagacaacaccaggtgaccagtttgcgccgctttaatagcgatctctgctgtttcgccatcgcggatctctccgatcatgatgacgtcaggatcctggcgcaataacgcacgcaaaacgccctgaaaggtgagtccggcacgcggatggatttgcgtctggtttagtccggctatggggatctcaactggatcttcgacgctacaaatattaatgtcagcggtattcagcttttgcagggcactataaagcgtgaccgttttgccgctgccggtagggccagttaccagcaccagtccctgtggttgttgcaaggcatgagcaaagtccgccagttgtaacggctgcattccaagcgtgttgacatccagtgcctgacccacctgctgtaacaaccttaataccaccttttcaccaccccgacatggtaaggtcgcaatacgaaaactgacggcgtttcctgccagttcgacagtgaattgcccgtcctgcggcaggcgatgttccgcaatatccaggtttcccagcacttttaatctggcggttaatgcgactccggcatccggactaacatccggtaaaggatgcaatacgccgtcgatacgcaagcggatgcggtaggcattgtccgctggttcgatatgaatatcagacgcgcgttgttccagcgcagattgtaacgttcgagttagcaactctgctttgggctgatgcttctcctgaacagctacgggcagtgtctgttgtgtgcgactggcgtgaccttccatttgttggcgcgtccagcaggtgatctcaatacgtttggtggtagcgaaatgcaatgcgtccagtagctcatggctaggtgcatcgactaccgcaacatgaaccacctcttcgctggcatccagcaagactccatgataacgcagacacagggcagtgagctgtggaatattcattgccgctccttagttggcgtcatcaaagcggaagacatcttcgcaggcttgctgcaatgcgctgtcactttgaatattgcagttgcgcgtccagccggtgacgccgtttgcgttatcccaacccggtgtcatgacgacgcttagcccattgagactttcttgcccggtcaggctcaccacgccctttgccacactcatggcactaacatagcgggtggtggtagggctgggaatgccattgctgccaccgtcgcaggtatctaatccaccatgttccagcgcgcacaactctacggcggtacggtaaggcacaaaggtttgtagcatgtcggtgagtgcggctttgcgcaggtagttttgataagcgggaataccaatggcgcttaaaatggcaatgatgccaataaccaccatcagttcgataagtgtaaaaccgcgttgcttgtccatctgtttcgctccttgatttggttggcgctactttggcaaacgccatcagcacaggcgaggggcaaaaaacgaaacgggaaagcagattccgaggttttttatttcgttgcagcgaaagacaagaaatttgcgaggcgttacgaagaaagttggggaaggggagattatccgcccgcgatggagcggataaatctgtcaactattagcgaaaacgcatactaaggtcgagtgcttgtacgtgtttagttagcgcaccgacggagataaagtccacgcccgtttcggcaaattcacgcagtgttttgtcagtgacgttgccagacacttccagtagcgccttgccgttggtgcgtttgacggcttcgcgcatctgttctgtttcgaagttatccagcatgatgatatcggctcctgctttcagggcttcatcaagttcttccagattctctacttcgacttctactggcgcatccgggtgcagccaggacgctttttcgaccgcctggcgcacactgccggaggcaataatatggttttctttgatcaggaaggcatcagaaagccccagacggtgattcgctccgccgccgcaaagtaccgcgtatttcagagcactacgcaggccgggtaaggttttgcgcgtatccaacaactgcgtgttggtgccttccagcaattcgacatagtggcgtaccttactggcaactccactaagggtttgcacaaaattaagcgcagtgcgttcgcccgttaacagcacgcgggatgggccttcaagttcgaacaaggattgattggcattgatgacatcgccgtcatccacatgccagattatggtgacatcgtcgcctgccagttgaataaacacctcttcaacccagcgtttgccgcaaaagacgccattctcgcgggtgatcaccgtggcatgagagcgagaattttccggtaaaagttttgccgtaatatcattgttggcatcgactgttccgcctaaatcttcccgcagcgcctgggccaccgcgccggggatatcgagattaatgcgttccagcagctcgtcacgtcgggtgtcagggttatagcggcgaggcggcatgttaaaactccagatagctaacgaatcataaggtagaaacatgctactctgaaccgggtattagcaccacatataaggagatcctgcatgttgttagaacaggggtggctggttggcgcgcgccgcgttcccagtccacattacgattgccgcccggatgacgaaacacccaccctgctggtggtgcacaatattagcctgccgccaggcgagtttggcggtccgtggatcgacgcattattcactggaactattgatccgcaggcacatcctttctttgctgagatcgcccatttgcgcgtctccgctcactgtttgattcgccgtgatggtgaaatagtccagtatgttcctttcgataaacgtgcatggcatgcgggagcctctcagtatcaggggcgcgaacgctgcaatgatttttctattgggattgagcttgaaggcaccgatacgctggcgtataccgatgcgcagtatcaacagcttgcggcggttacgcgggcactgattgattgctatccggatatcgctaaaaacatgacgggccattgtgatattgcgccggatcggaaaaccgatcccggtcctgcatttgattgggcacggtttcgtgtgctggtcagcaaggagacaacatgacgctatttacaaccttactggtgttaattttcgagcgcctgtttaagttgggcgagcactggcagcttgatcatcgtcttgaagcgttctttcggcgggtgaaacatttttctctcgggcgcacgttaggcatgaccattattgcgatgggcgtgacttttttactgttacgcgcattgcagggagtattgttcaacgttcccacgctactggtgtggctgctgattggtttgctgtgtattggcgcaggtaaagttcgtcttcattatcatgcttatctgacagctgctagtcgtaatgatagccatgcccgtgccacgatggctggcgaactcaccatgattcacggcgtcccggcaggctgcgacgaacgtgagtatttgcgtgagctgcaaaatgcattgctgtggattaactttcgtttttatcttgcaccgctgttctggctgattgtggggggaacctggggacccgttacgctgatggggtatgcgtttttgcgtgcatggcaatactggctggcgcgatatcagacgccgcatcatcgtttacagtccggcattgatgccgtgcttcatgtactggattgggtgccggttcgtcttgcgggtgtggtatatgccttgatcggtcatggtgagaaagcgttaccggcctggtttgctagcctgggtgatttccatactagccagtatcaggtgttaacgcgtctggcgcagttctctctggcgcgtgaaccgcatgtcgataaggtggagacgccgaaggcagcggttagtatggcgaagaaaaccagcttcgtggtcgtggtggtgattgcactactgacgatttacggggcgttggtgtaaagattattgccctcaccctgtacgggtgagggcgtagagagattaatgcgcttttacggctttggcggttttctctttaaacagatagccgatacctaacacgatcagccataccgggatcaggtatacgctaatcgccattcctggggtcatcagcataatcaccagtaccgccgccataaacagcaggcagatccagttacccagcggataaagcagagcagggaagcgagttaccacgccttgttcctgcttggcgcgacggaatttcatatgcgccaggctaatcatcgcccagttgattaccagtgcagataccaccagcgccattaacagtccgaaagcggactctggggcaaggtagttaatcagtacgcacaacgccgttaccagtgcagacaccagaatggtatttactggtacaccacgtttatcgacagacgccagcgcttttggcgcattaccctgttgtgccagaccaaacagcatacggctgttgcaatatacgcagctgttgtacacggagagcgccgcagtcagtaccacgatgttcagcgcattcgccacaaaggtatcgcctaactcgtggaagatcagcacaaacggactggtatcggcggtaacgcgggtccacggcatcagactgagcagaacggctaagctaccaatatagaaaatcaggatgcggtagataacctggttagttgctttcggtatactttgctccgggttatcagcttctgctgcggtgatccccaccagttccagaccaccgaagctgaacatgataatcgccatcatcatcaccagcccggtgaagccgtgcggcaggaaaccaccctgatcccacaggttgctaacggtcgcctgcgggccgccgttgccactgaatagcagccagccgccgaagatgatcatcgctaccaccgcgataactttgataatggcaaaccagaactccatctcgccaaacactttaacgttggtcaggttgatggcgttaatcaccacaaagaatacggcggcagaaacccaggtggggatttccggataccagaactgaatgtatttacccacggcagtcagctcagccatggcaactaaaacgtacagtacccagtagttccagccagaggcgaaaccggcaaaactgccccagtatttataagcaaagtggctaaaggagcctgcgacaggttcttcgaccaccatttcacccagctgacgcatgatcagaaaggcgataaaaccagcaatggcgtaacccaggataatccctggccctgcggactgtattacggaggcgctacccaggaataacccggtccctatcgcgccacccagcgcgataagctgaatatggcggtttttaaggccgcgctttagctgctcgccgtgctgttgaccttccatcatgaaacctcgtgcggtggttgtttttttgatctacgcagtgatgcgtgtgtaagtttgcaattccgtttgttgtattaatttgtttacatcaaagaagtttgaattgttacaaaaagacttccgtcagatcaagaataatggtatgcggcagcgaatgcacccgctttatgcatggttgaagatgagttgcttaaaaagaaaccgtttgtaaagctcagcctcaacccctctcaatatgtagaatgaatttaaattcgttttaattgaattaaaaatcacaaaattggtaagtgaatcggttcaattcggatttttatagtttaataatcgttaaaaaactcctttcctacgtaaagtctacatttgtgcatagttacaactttgaaacgttatatatgtcaagttgttaaaatgtgcacagtttcatgatttcaatcaaaacctgtatggacataaggtgaatactttgttactttagcgtcacagacatgaaattggtaagaccaattgacttcggcaagtggcttaagacaggaactcatggcctacagcaaaatccgccaaccaaaactctccgatgtgattgagcagcaactggagtttttgatcctcgaaggcactctccgcccgggcgaaaaactcccaccggaacgcgaactggcaaaacagtttgacgtctcccgtccctccttgcgtgaggcgattcaacgtctcgaagcgaagggcttgttgcttcgtcgccagggtggcggcacttttgtccagagcagcctatggcaaagcttcagcgatccgctggtggagctgctctccgaccatcctgagagtcagtatgacttgctcgaaacacgacacgccctggaaggtatcgccgcttattacgccgcgctgcgtagtaccgatgaagacaaggaacgcatccgtgaactccaccacgccatagagctggcgcagcagtctggcgatctggacgcggaaagtaacgccgtactccagtatcagattgccgtcaccgaagcggcccacaatgtggttctgcttcatctgctaaggtgtatggagccgatgttggcccagaatgtccgccagaacttcgaattgctctatagccgtcgcgagatgctgccgctggtgagtagtcaccgcacccgcatatttgaagcgattatggccggtaagccggaagaagcgcgcgaagcaagccatcgccatctggcctttatcgaagaaattttgctcgacagaagtcgtgaagagagccgccgtgagcgttctctgcgtcgtctggagcaacgaaagaattaatgatttttctggtaaaaattatccagaagatgttgtaaatcaagcgcatataaaagcgcggcaactaaacgtagaacctgtcttattgagctttccggcgagagttcaatgggacaggttccagaaaactcaacgttattagatagataaggaataacccatgagtgaacgtttcccaaatgacgtggatccgatcgaaactcgcgactggctccaggcgatcgaaagcgtcatccgtgaagaaggtgttgagcgtgctcagtatctgatcgaccaactgcttgctgaagcccgcaaaggcggtgtaaacgtagccgcaggcacaggtatcagcaactacatcaacaccatccccgttgaagaacaaccggagtatccgggtaatctggaactggaacgccgtattcgtagtgctatccgctggaacgccatcatgacggtgctgcgtgcgagcaaaaaagacctcgaactgggcggccatatggcgtccttccagtcttccgcaaccatttatgatgtgtgctttaaccacttcttccgtgcacgcaacgagcaggatggcggcgacctggtttacttccagggccacatctccccgggcgtgtacgctcgtgctttcctggaaggtcgtctgactcaggagcagctggataacttccgtcaggaagttcacggcaatggcctctcttcctatccgcacccgaaactgatgccggaattctggcagttcccgaccgtatctatgggtctgggtccgattggtgctatttaccaggctaaattcctgaaatatctggaacaccgtggcctgaaagatacctctaaacaaaccgtttacgcgttcctcggtgacggtgaaatggacgaaccggaatccaaaggtgcgatcaccatcgctacccgtgaaaaactggataacctggtcttcgttatcaactgtaacctgcagcgtcttgacggcccggtcaccggtaacggcaagatcatcaacgaactggaaggcatcttcgaaggtgctggctggaacgtgatcaaagtgatgtggggtagccgttgggatgaactgctgcgtaaggataccagcggtaaactgatccagctgatgaacgaaaccgttgacggcgactaccagaccttcaaaagcaaagatggtgcgtacgttcgtgaacacttcttcggtaaatatcctgaaaccgcagcactggttgcagactggactgacgagcagatctgggcactgaaccgtggtggtcacgatccgaagaaaatctacgctgcattcaagaaagcgcaggaaaccaaaggcaaagcgacagtaatccttgctcataccattaaaggttacggcatgggcgacgcggctgaaggtaaaaacatcgcgcaccaggttaagaaaatgaacatggacggtgtgcgtcatatccgcgaccgtttcaatgtgccggtgtctgatgcagatatcgaaaaactgccgtacatcaccttcccggaaggttctgaagagcatacctatctgcacgctcagcgtcagaaactgcacggttatctgccaagccgtcagccgaacttcaccgagaagcttgagctgccgagcctgcaagacttcggcgcgctgttggaagagcagagcaaagagatctctaccactatcgctttcgttcgtgctctgaacgtgatgctgaagaacaagagcatcaaagatcgtctggtaccgatcatcgccgacgaagcgcgtactttcggtatggaaggtctgttccgtcagattggtatttacagcccgaacggtcagcagtacaccccgcaggaccgcgagcaggttgcttactataaagaagacgagaaaggtcagattctgcaggaagggatcaacgagctgggcgcaggttgttcctggctggcagcggcgacctcttacagcaccaacaatctgccgatgatcccgttctacatctattacagcatgttcggcttccagcgtattggcgatctgtgctgggcggctggcgaccagcaagcgcgtggcttcctgatcggcggtacttccggtcgtaccaccctgaacggcgaaggtctgcagcacgaagatggtcacagccacattcagagcctgactatcccgaactgtatctcttacgacccggcttacgcttacgaagttgctgtcatcatgcatgacggtctggagcgtatgtacggtgaaaaacaagagaacgtttactactacatcactacgctgaacgaaaactaccacatgccggcaatgccggaaggtgctgaggaaggtatccgtaaaggtatctacaaactcgaaactattgaaggtagcaaaggtaaagttcagctgctcggctccggttctatcctgcgtcacgtccgtgaagcagctgagatcctggcgaaagattacggcgtaggttctgacgtttatagcgtgacctccttcaccgagctggcgcgtgatggtcaggattgtgaacgctggaacatgctgcacccgctggaaactccgcgcgttccgtatatcgctcaggtgatgaacgacgctccggcagtggcatctaccgactatatgaaactgttcgctgagcaggtccgtacttacgtaccggctgacgactaccgcgtactgggtactgatggcttcggtcgttccgacagccgtgagaacctgcgtcaccacttcgaagttgatgcttcttatgtcgtggttgcggcgctgggcgaactggctaaacgtggcgaaatcgataagaaagtggttgctgacgcaatcgccaaattcaacatcgatgcagataaagttaacccgcgtctggcgtaagaggtaaaagaataatggctatcgaaatcaaagtaccggacatcggggctgatgaagttgaaatcaccgagatcctggtcaaagtgggcgacaaagttgaagccgaacagagcctgatcaccgtagaaggcgacaaagcctctatggaagttccgtctccgcaggcgggtatcgttaaagagatcaaagtctctgttggcgataaaacccagaccggcgcactgattatgattttcgattccgccgacggtgcagcagacgctgcacctgctcaggcagaagagaagaaagaagcagctccggcagcagcaccagcggctgcggcggcaaaagacgttaacgttccggatatcggcagcgacgaagttgaagtgaccgaaatcctggtgaaagttggcgataaagttgaagctgaacagagcctgatcaccgtagaaggcgacaaggcttctatggaagttccggctccgtttgctggcaccgtgaaagagatcaaagtgaacgtgggtgacaaagtgtctaccggcagcctgattatggtcttcgaagtcgcgggtgaagcaggcgcggcagctccggccgctaaacaggaagcagctccggcagcggcccctgcaccagcggctggcgtgaaagaagttaacgttccggatatcggcggtgacgaagttgaagtgactgaagtgatggtgaaagtgggcgacaaagttgccgctgaacagagtctgatcaccgtagaaggcgacaaagcttctatggaagttccggcgccgtttgcaggcgtcgtgaaggaactgaaagtcaacgttggcgataaagtgaaaactggcagcctgattatgatcttcgaagttgaaggcgcagcgcctgcggcagctcctgcgaaacaggaagcggcagcgccggcaccggcagcaaaagctgaagccccggcagcagcaccagctgcgaaagcggaaggcaaatctgaatttgctgaaaacgacgcttatgttcacgcgactccgctgatccgccgtctggcacgcgagtttggtgttaaccttgcgaaagtgaagggcactggccgtaaaggtcgtatcctgcgcgaagacgttcaggcttacgtgaaagaagctatcaaacgtgcagaagcagctccggcagcgactggcggtggtatccctggcatgctgccgtggccgaaggtggacttcagcaagtttggtgaaatcgaagaagtggaactgggccgcatccagaaaatctctggtgcgaacctgagccgtaactgggtaatgatcccgcatgttactcacttcgacaaaaccgatatcaccgagttggaagcgttccgtaaacagcagaacgaagaagcggcgaaacgtaagctggatgtgaagatcaccccggttgtcttcatcatgaaagccgttgctgcagctcttgagcagatgcctcgcttcaatagtagcctgagcgaagacggtcagcgtctgaccctgaagaaatacatcaacatcggtgtggcggtggataccccgaacggtctggttgttccggtattcaaagacgtcaacaagaaaggcatcatcgagctgtctcgcgagctgatgactatttctaagaaagcgcgtgacggtaagctgactgcgggcgaaatgcagggcggttgcttcaccatctccagcatcggcggcctgggtactacccacttcgcgccgattgtgaacgcgccggaagtggctatcctcggcgtttccaagtccgcgatggagccggtgtggaatggtaaagagttcgtgccgcgtctgatgctgccgatttctctctccttcgaccaccgcgtgatcgacggtgctgatggtgcccgtttcattaccatcattaacaacacgctgtctgacattcgccgtctggtgatgtaagtaaaagagccggcccaacggccggcttttttctggtaatctcatgaatgtattgaggttattagcgaatagacaaatcggttgccgtttgttgtttaaaaattgttaacaattttgtaaaataccgacggatagaacgacccggtggtggttagggtattacttcacataccctatggatttctgggtgcagcaaggtagcaagcgccagaatccccaggagcttacataagtaagtgactggggtgagggcgtgaagctaacgccgctgcggcctgaaagacgacgggtatgaccgccggagataaatatatagaggtcatgatgagtactgaaatcaaaactcaggtcgtggtacttggggcaggccccgcaggttactccgctgccttccgttgcgctgatttaggtctggaaaccgtaatcgtagaacgttacaacacccttggcggtgtttgcctgaacgtcggctgtatcccttctaaagcactgctgcacgtagcaaaagttatcgaagaagccaaagcgctggctgaacacggtatcgtcttcggcgaaccgaaaaccgatatcgacaagattcgtacctggaaagagaaagtgatcaatcagctgaccggtggtctggctggtatggcgaaaggccgcaaagtcaaagtggtcaacggtctgggtaaattcaccggggctaacaccctggaagttgaaggtgagaacggcaaaaccgtgatcaacttcgacaacgcgatcattgcagcgggttctcgcccgatccaactgccgtttattccgcatgaagatccgcgtatctgggactccactgacgcgctggaactgaaagaagtaccagaacgcctgctggtaatgggtggcggtatcatcggtctggaaatgggcaccgtttaccacgcgctgggtagtcagattgacgtggttgaaatgttcgaccaggttatcccggcagctgacaaagacatcgttaaagtcttcaccaagcgtatcagcaagaaattcaacctgatgctggaaaccaaagttaccgccgttgaagcgaaagaagacggcatttatgtgacgatggaaggcaaaaaagcacccgctgaaccgcagcgttacgacgccgtgctggtagcgattggtcgtgtgccgaacggtaaaaacctcgacgcaggcaaagcaggcgtggaagttgacgaccgtggtttcatccgcgttgacaaacagctgcgtaccaacgtaccgcacatctttgctatcggcgatatcgtcggtcaaccgatgctggcacacaaaggtgttcacgaaggtcacgttgccgctgaagttatcgccggtaagaaacactacttcgatccgaaagttatcccgtccatcgcctataccgaaccagaagttgcatgggtgggtctgactgagaaagaagcgaaagagaaaggcatcagctatgaaaccgccaccttcccgtgggctgcttctggtcgtgctatcgcttccgactgcgcagacggtatgaccaagctgattttcgacaaagaatctcaccgtgtgatcggtggtgcgattgtcggtactaacggcggcgagctgctgggtgaaatcggcctggcaatcgaaatgggttgtgatgctgaagacatcgcactgaccatccacgcgcacccgactctgcacgagtctgtgggcctggcggcagaagtgttcgaaggtagcattaccgacctgccgaacccgaaagcgaagaagaagtaatttttcgtttgccggaacatccggcaattaaaaaagcggctaaccacgccgctttttttacgtctgcaatttacctttccagtcttcttgctccacgttcagagagacgttcgcatactgcactccgttgctcgttattcagcctgacagtatggttactgtcgtttagacgttgtgggcggctctcctgaactttctcccgaaaaacctgacgttgttcaggacttgcgctttgaacacgctggcgggcgttatcacgttgctgttgattcagtgggcgctgctgtactttttccttaaacacctggcgctgctctggacttgcggactgaatacgctcacgcgctgcgtctcttcgctgctggttctgcgggttagtctgcattttctcgcgaaccgcctggcgctgctcagggctggcggactgaatgcgctcacgcgctgcctctcttcgctgctggatcttcgggttagtctgcattctctcgcgaactgcctggcgctgctcagggctggcggactgataacgctgacgagcggcgtccttttgttgctgggtcagtggttggcgacggctgaagtcgtggaagtcgtcatagctcccatagtgttcagcttcattaaaccgctgtgccgctgcctgacgttgggtatctcgtgtaatgactggtgcggcgtgtgttcgttgctgaaactgatttgctgccgcctgacgctggctgtcgcgcgttggggcaggtaattgcgtggcgctcattccgccgttgacatcggtttgatgaaaccgctttgccatatcctgatcatgatagggcacaccattacggtagtttggattgtgccgccatgccatattcttatcagtaagatgctcaccggtgatacggttgaaattgttgacgtcgatattgatgttgtcgccgttgtgttgccagccattaccgtcacgatgaccgccatcgtggtgatgataatcatcattgtcatgatgatgatggtcatgatcgtcgtcgtcccagtcgatgctgctgaatagtgcgtacgtggtagcaacgcccatgctatagccgaatccgcgtacaaagctgtcaacaaacggttctccggctggtggtggcagataaaccggcggatacgcagtattggcccagttcccgtaaaccacggttgggttgtagttgggaatatagaccacatcaggattggcgggctcaatggaaatgacggttgttgccggctctgtaatgacggggttggcagttaaaactgtattggatggtatgacgggtgccgtgactgtctgttttaccggtacagctttcttcgttgtggtaataactttctgttcggtactactcttcaggctgccggtttgttgcgccagttgccgcaatcgctgtacgctgtccatcacgtcctgcggctgggccagaaaagcatcgcccaggttttgcacccattgcgggttttcgcccatcaatgccatcaattgtggaaaggccaccagacttttaacgctggcgtcccacggctggtcagataccgcctgaatagcagcatcgccttgtttaagtggattatcgtggctccattgcactgcttgagcaacgtttgtcggataggtacttgccatcagcacctggctaagtagggcgtcgggatacagcgcgacgggcgcgacccattgatctatttgtgcagtgctgaatgcggatttgacgacggcgggtgttacgggaggtgcggaaaccgttgcaggaaacgtaaccgcggcagcgtcagacacagccagttgtgtgctttgcggttccacaggcgcttccactgtgcggctttttatatatagcccggtagaggcggcacaaagcccggcactgcaaattagcgccagcacatggggtttaaacggcaaagtcattttcataattcggatctcaaggaaatcgcaatggtcggcgaactgccacccgcaggtgctgtgaatccgagtataaagaggcggtagtttaaattttgactaatcttgggattcgttgagaaaggtgattatcaccatgcgaattaacgaagtttttacggagggaaacaatctctagaccatccttaacgattcagccacttttttatgttgcttttttgtaaacagattaacacctcgtcaaaatcctgctattctgcccgttgcggtactgggcatttaccctacaaactgctgtctcacaggagcgtgaagagaatcgcctgccgcactatgacaatgagagcgaggagaaccgtcgtgctagaagaataccgtaagcacgtagctgagcgtgccgctgaggggattgcgcccaaacccctggatgcaaaccaaatggccgcacttgtagagctgctgaaaaacccgcccgcgggcgaagaagaattcctgttagatctgttaaccaaccgtgttcccccaggcgtcgatgaagccgcctatgtcaaagcaggcttcctggctgctatcgcgaaaggcgaagccaaatcccctctgctgactccggaaaaagccatcgaactgctgggcaccatgcagggtggttacaacattcatccgctgatcgacgcgctggatgatgccaaactggcacctattgctgccaaagcactttctcacacgctgctgatgttcgataacttctatgacgtagaagagaaagcgaaagcaggcaacgaatatgcgaagcaggttatgcagtcctgggcggatgccgaatggttcctgaatcgcccggcgctggctgaaaaactgaccgttactgtcttcaaagtcactggcgaaactaacaccgatgacctttctccggcaccggatgcgtggagtcgcccggatatcccactgcacgcgctggcgatgctgaaaaacgcccgtgaaggtattgagccagaccagcctggtgttgttggtccgatcaagcaaatcgaagctctgcaacagaaaggtttcccgctggcgtacgtcggtgacgttgtgggtacgggttctagccgtaaatccgccactaactccgttctgtggtttatgggcgatgatattccacatgtgccgaacaaacgcggcggtggtttgtgcctcggcggtaaaattgcacccatcttctttaacacgatggaagacgcgggtgcactgccaatcgaagtcgacgtctctaacctgaacatgggcgacgtgattgacgtttacccgtacaaaggtgaagtgcgtaaccacgaaaccggcgaactgctggcgaccttcgaactgaaaaccgacgtgctgattgatgaagtgcgtgctggtggccgtattccgctgattatcgggcgtggcctgaccaccaaagcgcgtgaagcacttggtctgccgcacagtgatgtgttccgtcaggcgaaagatgtcgctgagagcgatcgcggcttcagcctggcgcaaaaaatggtaggccgtgcctgtggcgtgaaaggcattcgtccgggcgcgtactgtgaaccgaaaatgacttctgtaggttcccaggacaccaccggcccgatgacccgtgatgaactgaaagacctggcgtgcctgggcttcagcgctgacctggtgatgcagtctttctgccacaccgcggcgtatccgaagccagttgacgtgaacacgcaccacacgctgccggacttcattatgaaccgtggcggtgtgagcctgcgtccgggtgacggcgtcattcactcctggctgaaccgtatgctgctgccggataccgtcggtaccggtggtgactcccatacccgtttcccgatcggtatctctttcccggcgggttctggtctggtggcgtttgctgccgcaactggcgtaatgccgcttgatatgccggaatccgttctggtgcgcttcaaaggcaaaatgcagccgggcatcaccctgcgcgatctggtacacgctattccgctgtatgcgatcaaacaaggtctgctgaccgttgagaagaaaggcaagaaaaacatcttctctggccgcatcctggaaattgaaggtctgccggatctgaaagttgagcaggcctttgagctaaccgatgcgtccgccgagcgttctgccgctggttgtaccatcaagctgaacaaagaaccgatcatcgaatacctgaactctaacatcgtcctgctgaagtggatgatcgcggaaggttacggcgatcgtcgtaccctggaacgtcgtattcagggcatggaaaaatggctggcgaatcctgagctgctggaagccgatgcagatgcggaatacgcggcagtgatcgacatcgatctggcggatattaaagagccaatcctgtgtgctccgaacgacccggatgacgcgcgtccgctgtctgcggtacagggtgagaagatcgacgaagtgtttatcggttcctgcatgaccaacatcggtcacttccgtgctgcgggtaaactgctggatgcgcataaaggtcagttgccgacccgcctgtgggtggcaccgccaacccgtatggacgccgcacagttgaccgaagaaggctactacagcgtcttcggtaagagtggtgcgcgtatcgagatccctggctgttccctgtgtatgggtaaccaggcgcgtgtggcggacggtgcaacggtggtttccacctctacccgtaacttcccgaaccgtctgggtactggcgcgaatgtcttcctggcttctgcggaactggcggctgttgcggcgctgattggcaaactgccgacgccggaagagtaccagacctacgtggcgcaggtagataaaacagccgttgatacttaccgttatctgaacttcaaccagctttctcagtacaccgagaaagccgatggggtgattttccagactgcggtttaaaaagtcagcgcacgcgctgcgcataaacgacacaatgcccggtgaatgagattcccgggcatttttttatttctaaaccatcgccgttccgctgtttttctccggtaaggctgcgataattacatcaatggcgcaatgcgatttcggtgcattgccgggagcagaggaacacactatggattacgaatttctgcgcgatattaccggagtggtaaaggtgcgtatgtccatggggcatgaagtggtcgggcactggtttaatgaagaggtgaaagaaaacctggccttgcttgatgaagtggaacaagcagcgcacgcactgaaaggtagcgaacggtcctggcaacgggcagggcatgaatacaccctgtggatggacggtgaagaggtgatggttcgcgccaatcaactggaattcgctggcgatgaaatggaagaggggatgaactactacgacgaagaaagcctgagcctatgcggcgttgaggattttctgcaggtcgtggcggcttaccgcaatttcgtgcagcagaagtaaataaatctggcggagcctgggagctccgccagagccgttaaacagctggcatattgcgcccgtaataaatctcgcgcatttctttccacagcgcagcggtaatttcctggcgctcgctgtcggttaagtcttccggtttggtgtggaacatgtagtgcttaaggtcgaactctttaagcaacatcttggtatggaagatattttcctgatagacgttcacatccaccatgtcatacagcgccttcatatcgtcagacataaagttctgaatgctattaatctcatggtcgataaagtgcttcataccgttaatgtcgcgggtaaaaccgcgcacgcgataatcaatggttacgatatcggactcaagctggtggatcaggtaattcagcgccttcagcggagaaatcacgccgcaggtagagacttcaatatcggcgcggaaggtacataaaccgccttcaggatgactttccgggtaggtatgtacgcaaatatgacttttatcaagatgggcaacgaccgtttctggcagtgggccggggtgttctgttttgtcgatgagtttcgggtcaaccggttcttcactcaccagaatagtgacgctggcaccctgtggttcgtaatcctggcgggcgatgttaagaatattagccccgataatggaacaggtttcactcaggatttcggtcagacggttggcattatagagttcatcgatataagcaatataaccgtcgcgctcttcggcagttttggcgtagcagatatcgtaaatacaaaaactcagacttttggtcagattattaaagccatgcagtttcagttttttcaatttcttatcttctccttaggacggctgactagccagtgcgtcttgcagatactgaggtaaggcaaaagctgccgtatggattgccggattgtaataacggcatttcaggccagaggcgagaaaacgcgcctgaataatttcggtactgagatggcgtaaggcgtcgttatctgtcgcccatgcaaaagtcatgataccgccgtaataggtcgggatcgccgcctgataaaagccaacgtcgctgaagtaatggctgagtttgcgatggctgtcgatggcttcttcctgctgtaaaaagcagacgccgttttgtgcgacgaagataccgccaggattcaggcaacgtttgcagccttcataaaatgcgctagtgaaaaggctttcgccgggaccgataggatcggtgcagtcggagataatgacatcaaaggtctggctggtttgattaacgaaattgacgccatcgtcgatcaccagcttaaagcgcggatcgtcgtagctaccggcgttatggttgggtagatactgacggcagaagcttacgacacccgcatcgatttccaccatcgtgatactctcaacgtttttatgtcgggttacttcacgcagcatggcaccgtcgccgccgccgataatcagcacatgtttcgcgtgaccatgggccagtagcggaacatgggtcatcatctcatgatagataaactcgtcgcgctcggtggtttgtactacgccatccagcgccattacgcgaccaaatgcagcgttctcaaaaatgatcagatcctggtgatcggtcttttcatgatacagaacgttatctaccgcaaagtactgcccaaactggtcgtgtagcgtttcatgccactgttttttttcggccatgggttgatacctcctttgttaacacccgtaaaaaaagggcgcaacataatagctaacattgaccgcggatgcacggtcaatatttctacaaaaaggtatcagggattatttgacgtaggcaagcaggcttaaggaatcgcgggccagggctttgcattttttagcgacgggaatgccaatgccgctgagatcgcggtagctgtcttcaccgagggctttcatgtcgaaggtgtcgtaattactgaggtcccactggttttgctgagcgaaaaagaccagtgcgcgacgaatttgcccgttaggtaagttctggtaaccacaatcgttcttcagaaagacaaaaactgccgttaaatcggccatatcttcggcttcagactcgctgagcgcgtaactgtttgcgcagacggccatcaggctgccgaataacactgttctgaaaaacgtcttcattgcttctaccaggggcttaaagaagataaacgttagcacactgcgagcgaggcgacgaccattattgtcgattaaattgtgtctgcggcttgaccttcccgtaaggggaaggactatgctcaacgtttgattttgtttcgcctgcttaagaataaggaaataactatgcaacgtcgtgatttcttaaaatattccgtcgcgctgggtgtggctagcgctttgccgctgtggagccgcgcagtatttgcggcagaacgcccaacgttaccgatccctgatttgctcacgaccgatgcccgtaatcgcattcagttaactattggcgcaggccagtccacctttggcgggaaaactgcaactacctggggctataacggcaatctgctggggccggcggtgaaattacagcgcggcaaagcggtaacggttgatatctacaaccaactgacggaagagacaacgttgcactggcacgggctggaagtaccgggtgaagtcgacggcggcccgcagggaattattccgccaggtggcaagcgcagcgtgacgttgaccgttgatcaacctgccgctacctgctggttccatccgcatcagcacggcaaaaccgggcgacaggtggcgatggggctggctgggctggtggtgattgaagatgacgagatcctgaaattaatgctgccaaaacagtggggtatcgatgatgttccggtgatcgttcaggataagaaatttagcgccgacgggcagattgattatcaactggatgtgatgaccgccgccgtgggctggtttggcgatacgttgctgaccaacggtgcaatctacccgcaacacgctgccccgcgtggttggctgcgcctgcgtttgctcaatggctgtaatgcccgtagcctcaatttcgccaccagcgacaatcgcccgctgtatgtgattgccagcgacggtggtctgctacctgaaccagtgaaggtgagcgaactgccggtgctgatgggcgagcgttttgaagtgctggtggaggttaacgataacaaaccctttgacctggtgacgctgccggtcagccagatggggatggcgattgcgccgtttgataagcctcatccggtaatgcggattcagccgattgctattagtgcctccggtgctttgccagacacattaagtagcctgcctgcgttacctagcctggaagggctgacggtacgcaagctgcaactctctatggacccgatgctcgatatgatggggatgcagatgctaatggagaaatatggcgatcaggcgatggccgggatggatcacagccagatgatgggccatatggggcacggcaatatgaatcatatgaaccacggcgggaagttcgatttccaccatgccaacaaaatcaacggtcaggcgtttgatatgaacaagccgatgtttgcggcggcgaaagggcaatacgaacgttgggttatctctggcgtgggcgacatgatgctgcatccgttccatatccacggcacgcagttccgtatcttgagtgaaaatggcaaaccgccagcggctcatcgcgcgggctggaaagataccgttaaggtagaaggtaatgtcagcgaagtgctggtgaagtttaatcacgatgcaccgaaagaacatgcttatatggcgcactgccatctgctggagcatgaagatacggggatgatgttagggtttacggtataaaaagaccgtattcggaaatatgcccggatctctccgggcattaaactgatgacaaacgcaaatctgcctgatgcgctacgcttatcaggcctacgctagctgtgcaatccattgattttgcacaattttgtaggctggataaggcgttcacgccgcatccggcatgaacaacgcgcacgttgtcagcaatctgagcaagtcttacttcacatcatccggcagcgcataagccacaatatagtcgcccatcttcgtaccaaaactaccgtgaccgcctgcggagatcaccacatactgcttaccattcacttcataggtcattggcgtagcctgaccacccgctggtaaacgaccctgccacagtttttcaccgttgctcatgttgtaagcgcgcaggtagttatctgccgtagcggcgataaacagcacgttacccgccgtggagattggcccgcccagcatcggcatacccatattgaacggcaccggaaccggcatcgggaacggcatactgtcctgcggcgtaccaatacgtttcttccacaccacttcattagttttcagatccagcgcgctgatataaccccatgctggctgtttacatggcagaccaaatggactgaggaacgggttgagcgtgacaccatacggtacaccgtactgtggctgaatgccggattccgtacccgtgcctttggcatctttcggctgctccatcgggttgccaggaccacgcgggatcagtttgctaacaaacggcagtgccattgggttggcaatcgccacttcacgatttggatcaacggaaatcccgccccattcgaacatccccaggttacccgggaagaccagcgtaccctgttcagatggcggggtgaaaatgccttcatagcgcatctggtggaacatcacgcggcacaccagttggtcaaacatggtggctccccacatatccgcaccgctcaaatctttcgtcggacggaagctcagttcagaaaacggttgagttggggttacgtaatcgcctttcgctgcaccttggggaaccggtttttccggtgccggaaccaccagttcgccattacgacgatcgagcacaaaaatgttgccggttttcgccggagcgtaaataactggcactttctgaccattaacggtgatgtccgccagcgtcggctgtgccggaagatccatgtcccacaggtcgtggtgaacggtctggtagctccacgccagtttcccggtagtggcattcagcgccagaatgctgctggcataacgttcctgttccggtgtgcggttaccgccccagatatccggcgtggtcacgcccatcggcagatagaccagatccagcttcgcgtcataggccgctggtgcccaggagtttgggctgttaaaggtaaaggtgtgttcgtcagacgggattgcgttcggatctttcgcgccgggatcaaaagcccacagcagctccccggtgttgacatcaaaaccacggatcacgccagacgtttcgcgggtactgaagttatcggtaacactaccggccatcacgatggttttatcggtgataatcggtgggctagtcggttcatacagacccggtttggtgtctggcatattgctttgcagattgagcacgcctttattggcgaaggtttcgcacagtttgccgttttcagcgttaatcgcaatcagtcgaccatcattgaccggaagaatgatacgacgcgggcaatccgccatcacttccgggctagcggtttctgctttggcttcatgataagagacaccacggcaggttacgtgctggaaagactcgttggttttcagctcaggatcgtaatgccatttctctttgccgctggcggcatcaagcgcaaacaggcgctggtgagcggtacacaggtaaagggtgtcgcccactttaatcggcgtcacttcattggtgatttcacccggatcgttcggctgcttcacatcgccagtacggaacacccaggcttctttcagattatggacgttatcggcgttaatttgtttcagcgggctaaagcgttgaccttcctgattacgaccataggcaggccagtcctgatcggctacgggggagatagcttcagcaggtgtggcatcggcgcttaaggtgccgttgatctcctgcggatcgttaaatccggcccaggtcaggataccaccgctaatcagcagtgcgaccaccagtgcggcaactgcgccgctggcaggaatgaccaggcgacgccagacaaacggcaggatcagccagatgccgaagaagaccagaatgtcgctgcgcggagtcagcgcccagaagtcgaaaccaacttcccagacgccccaaatcatggtgccgagcagcagggctgcgtatagccaaagcgcggcgcgtttactgcgccacagcatccaggcgacgccgagcatcacaaggccagcgatagggtagtaccaggagccgccaatcgcgaccagccagcctccgccaatgagtagatacagcccgcaaagcgctgcaaaaagggctgttagcgtgacgagtaatcgtcggctgcctgtattgttaattgccataaagagacaccatttcaattcattaatattttagtagcaattaattataggttttaacatgtgtgatcgtcatcacaattcgagctttattaacagattccgcgaatgaatagttttactggtatactgcgtgtcttgcgctttgttgcggtgccaaaacctgcccgtgcgaagtgatttgtttttaaatcatatggttagagatatgaaacatactgtagaagtaatgatccccgaagcggagattaaagcgcgtatcgccgaactgggtcgtcagattactgagcgttacaaagacagcggcagcgatatggtgctggtgggtctgctgcgtggcagttttatgtttatggcggacctgtgccgtgaagttcaggtatctcatgaagtcgactttatgaccgcctccagctacggtagcggcatgtccaccacccgtgatgtgaaaatcctcaaagatctggatgaagatatccgtggcaaggacgtgctgattgttgaagatatcatcgacagcgggaatacactgagcaaagtgcgtgagatcttaagcctgcgcgaaccgaagagcctggcgatttgtacgctgctggataaaccgtcccgtcgtgaagtgaacgtcccggtagaatttatcggtttcagcatcccggatgagtttgtggtgggttacggcattgattacgcacagcgttaccgtcatctgccgtatatcggcaaagtgattctgctggacgagtaagtgtgaagttgccggatgtgttgcatccggcatggcatttttatttgtggttggcgtgtttcagcttgaggttggaaatcccgtgacggtaacgttgctcaagggtttcgcggttggtggcggtaacatccagatcacgcagcaagccgtcgtgaatgccgtaggcccagccgtgaatggtaactttctgcccgcgtttccacgcactttgcataatggtggagtggcccaggttatacacctgttccatgacgttcagttcacacaaggtatccagacggcgctcttgcggcatttcgccgagcaaactgctatgtttgaaccagatatcgcggatatgcagcagccagttgttgataagccccagttccgggttttcaactgcggcttgtacgccgccgcaaccgtagtggccacagataataatgtgttcaacttcgagtacatccactgcatactgaaccacggaaaggcagttcaggtcagtgtgaatgaccaggttagcaacattacggtgaacaaagagttcgcccggttcaagaccggttaaacgttctgcaggaacgcgactgtcggaacatccaatccatagaaagcgcggtttttgcgcttgtgccagtttctcaaaaaacccgggatcctcttccaccagcattttactccatagtgcattgttgctgatgagtgtatctatgtctttcatggaggttaacgacctgtaaccaaataattacgtttggctaatatagggcaactccgggacgatttaaaccacagataaagtgtaagaacgtaaggtaagtaaaaatttatgaccattgcactggaacttcaacagcttaaaaaaacctatccaggcggcgttcaggcgcttcgtgggatagatttgcaggtcgaagcgggtgatttttatgcgcttctcgggccgaacggggccgggaaaagcaccactatcggtattatcagctctctggtaaataaaacctccgggcgggtcagcgtatttggttacgatctcgagaaggatgtcgtgaacgctaaacgtcagttgggactggtgccgcaggaatttaacttcaacccgtttgaaaccgtgcagcaaattgtggtgaatcaggcagggtactacggcgtggagcgcaaagaagcgtacatccgcagcgaaaagtatcttaaacaactcgatctatggggaaaacgcaacgaacgtgcgcgtatgttatctggcgggatgaagcgccgtttaatgattgcccgtgcgttaatgcatgaacctaaactactgattctcgacgaaccgaccgcaggcgtggatattgaacttcgccgcagtatgtggggctttttgaaggatttaaacgacaaaggcaccaccatcattctcaccacacactacctggaagaagcagaaatgctgtgccgcaatatcggcattattcaacacggtgagctggtggaaaataccagcatgaaggcgctgctggcgaagctgaaaagcgaaacctttattctcgatctcgcaccgaaaagcccgttaccgaagctcgatggctatcagtatcgactggtcgataccgcgacgctggaagttgaagtgctgcgtgagcaggggatcaacagcgtatttacgcagttaagtgagcagggcattcaggtattaagtatgcgtaacaaagctaaccgtctggaagagctgtttgttagtctggttaatgaaaaacaaggagatcgcgcatgatgcatctttactgggtggcgctaaaaagcatctgggcgaaagagatccatcgctttatgcgtatctgggtgcagacgctggtgccgccagtcatcaccatgaccctttactttattatcttcggtaacctgattggtagccgtattggcgatatgcatggcttcagctatatgcagttcatcgtaccggggctgatcatgatgagcgtgatcaccaatgcctacgccaacgttgcgagtagtttttttggtgccaagttccagcgtaatattgaagagctgctggtagcgccggttccgactcacgtcattattgccggatatgtcggcggtggcgtggcgcgtggtctgtttgttggcattctggtgacggcaattagtctgttttttgtgccatttcaggtgcatagctgggtattcgttgccttaacgctggtgctcacggcggtgttgttctcccttgcgggtttgctgaacggtgtgtttgccaaaacgttcgatgacatcagcctggtgccaacctttgtgttaacgccactcacgtatttgggcggggtcttttacagtctgactttgttgccgccgttctggcaagggctgagccacctgaacccaatcgtttatatgatcagtggtttccgctacggcttcctcggtatcaatgatgttccgctggtcactacctttggcgtactggtggtctttattgtggcgttttatttgatctgttggagcctgatccaacgtggacgtggtttgcgtagctaaggctatttcctctcctctggatttgggggagaggagttttgacggctatcaccctttatcaacaatggtcagggtagactgattttcggctaaggaggaaggcgatgttaggttgggtaattacctgtcacgatgaccgggcgcaagagatactggatgcgctggagaaaaaacatggggcacttcttcagtgccgggccgtgaatttctggcgcggattaagctctaatatgctcagccgcatgatgtgcgatgctctgcatgaagcggactctggtgagggtgtcatcttcttaaccgatatagccggagcgccaccgtatcgcgtggctagtttattaagccacaaacactcccgttgcgaagtgatttctggtgtcacgttaccgttaattgaacagatgatggcttgccgtgaaaccatgaccagtagtgagtttcgcgagcgtattgtcgaactgggtgcgccggaggtgagtagtctttggcaccaacaacaaaaaaatccgcctttcgtcctcaaacataatttgtatgagtattaacccgcgattctgatggcgcttttgctacaataaaagcgttgtttcaccctcggttattttttcatgtacaaacaagctgttattctcctgctgatgctgtttaccgcaagtgtcagtgccgcgttacctgcccgttatatgcaaaccatcgaaaatgctgcggtctgggcgcaaattggtgacaagatggtgaccgtggggaatattcgggccggacaaatcattgccgtggagcccactgccgcaagttattacgcatttaattttggctttggcaaaggttttatcgataaaggtcatctcgagccggttcaggggcgacaaaaagttgaagacggtttgggcgacctcaacaagccgctgagtaatcagaacttagttacctggaaagatacgccggtctataacgcgccgagtgcgggaagtgcgccatttggggtactggcggacaatttgcgctacccgattttgcataaactgaaagacaggttaaatcaaacctggtatcagatccgtattggcgatcgactggcctatatcagcgcactggatgcccaacccgataatggcctgagcgtgctaacctatcaccatattctgcgcgacgaagaaaacacccgttttcgccatactagcacgaccacaagcgtacgcgctttcaataaccagatggcctggctgcgtgacaggggatacgcgacactgagcatggtgcagctggaaggctacgtgaagaataagatcaatctccctgcgcgagcggtggtgattacctttgatgatggcctcaagagcgtgagccgctatgcgtatcctgtgttgaaacaatatggcatgaaggcgacggcgtttattgttaccagtcgcatcaaacgtcacccgcagaagtggaacccaaaaagcctgcaatttatgagcgtttctgagcttaacgaaattcgcgatgtatttgatttccagagtcatacccattttttgcatcgggtagatggttatcgccgacccatattactgagccgtagtgagcacaatattctgtttgattttgcacgtagtcgccgcgctctggcgcaatttaatccgcatgtctggtatcttagctatccgtttggcggatttaatgacaacgccgtgaaggcagcaaacgatgccggatttcacctggcggtgacaaccatgaaaggcaaagtaaaaccgggggataatccgttgttactaaaacgactttatatcttaagaacggatagcctggagacgatgagccggctggtgagtaaccagccgcagggataacaatcaagcaacctgtaccggaatcgctttcgcggtacgtttcatttcattgtcgccttcaaaataggcgacgttgggtcgccaggtgcgagcttcttcatctggcatggtaacgaagctggcgatgatgacaatatcgccgacactggcgcagtgggccgccgcaccgttaacagaaataattctgctaccgcgttctgccgcgatggcataagtggagaaacgcttgccgttggtgacattccagatatcaatggcttcgttttcgagaataccggctgcgtcaagaaaatcctggtcaatggcgcaagaaccttcatagtgcaggtccgcatgagtcactttcacgcggtggagtttgccctgcagcatcgtgcgaatcataacttctacctttctaccctgtcgttaacgaagcaggcgatgcctgctttgaggaaattctcacgcagtattgcccgatttttgtttagtgtctactcatctgacggcatttgcgtcagcagtttgcgtaccgcgccgaagcgtgccatgtatcgcctgtaacgaattgatatttctctgaacgctgctcggtaaacaataaagaggtggctgacgatagcgcgccttgactggatactgccttcacgcaaagccacacggaagacagggaagatggatgcaccgagtaccacaccgcatgacgcggtatttaaacaatttttaatgcatgcggagacggctcgcgactttctggagatacatttgccagtggaattacgcgaactttgtgacctcaacacgcttcatttagagagcgggagtttcattgaagagagcctgaaaggacacagcacggacgtgctctattccgtgcaaatgcagggcaatcccggttatctgcatgttgtgattgaacaccaaagcaagccggataagaaaatggcctttcgcatgatgcgttattctatagccgccatgcaccggcatctggaggctgaccacgataagctgccgctggtggtgccgatactgttttatcagggcgaggccacaccttatccgctaagtatgtgctggtttgatatgttttacagcccggagctggcgcgacgcgtctataacagtcctttcccgctggtggatatcaccatcacaccggatgacgaaatcatgcaacatcggcggattgcgattctcgaactactgcaaaaacatattcgccagcgcgacttaatgttattgcttgagcaactggtcacgctgatcgacgaagggtacactagcggaagtcagttagttgccatgcaaaactatatgctgcaacgcggtcatactgaacaagcggatttgttttacggtgtgttgagagacagggaaacgggaggggagtctatgatgacgctggcgcagtggtttgaagagaaagggattgagaaggggattcagcagggaagacaggaagtaagtcaggaattcgcccagcgtcttctgagtaaaggaatgtctcgggaagacgttgcagagatggcaaatttacctcttgctgagattgataaggtaattaaccttatttaagttacctgtgttatgacagatgacgtggggtaaattaataactggcgccatcagccgtagcgccagttaagtattacgccagctcgaccattttgttgtcgatcaggcgagcatcgccaagccaggcggctaccagaattactgcccgtttgctggtttcagaaacttccagcaatgtgtcggcatcgcgaatctgaatatcatcggcgcggaagcctttttcattcagttcttgccccgcaatggtaataatttcatcgagatcccgttccccagcctgcaatttgtcagcaatgctacttaaaactttgtacagaccaggcgcaattttgcgttgttccgccgtcagataaccgttacgggaacttagcgccagaccgtctttggcgcgcataattggcacaccgacaatctcaatatcgaagcccatatcggcaaccattttgcggatcagcgccagttgctgaaaatctttttcaccgaagcaggcgatgtccggctggaccaggttgaacagcttgctgacaatagtgctaacgccgcgaaaatgtcccggacggctggcaccttccagcatggtgctaaggccaggaacgtcaacgtaagtgtgggtttcagtaccgttcgggtagatctcttttacgctaggggcgaaaactaaatccactttacgtttgtttagcttctcgcagtcctcctgcaaggtccgtggataacgagccagatcttccgggcggtcgaactgcatcgggttaacgaaaatactgacgacgaccacatcggcgcgggctttggcttcgtcgaccagcttcatatggccatcgtgcaggttacccatggtaggcaccagcgccacgcgcttgccttccatacgcaggcggcgaatttgctgacgcagcagcggcagggtttcgataattaacacaacgtgactccttaatggaaactgtgttcttcgcccggataaacgccggactccacttcagccatatactgccgcacagccgcgcggatgtcgcccgtttcggcgaggaaatttttagcgaatttaggaatgtgaccgccggtaataccaaaggcgtcgtgcatcacgaggatctgcccgtcagtgacgttgcctgcgccaatgccaataaccgggatcgccagtgcttcggtaatacgttttgccagttcaaccggcacgcattccagcaccagcagctgtgccccagcagcttctaaggctaatgcatcgctgagcagttgatcgcccgcttcatcgccgcgcccctgaactttgtagccaccgaaaatattcacactctgtggtgttaaacctaagtgaccacatacaggaacggcacgttcggtcagcatttgtacggtttctaccagccactcaccgccttcaattttgaccatgttagcaccggcacgcataaccgttgcggcgttttcgaaggcttgttccggcgtggcatacgccataaacggcaggtcagccagcagcaggcagtttggtgcgccgcgacgtacggcggcagtgtggtaggcgatatcggcaacggtaactggcagggtggagtcgtgcccctgaaccgtcatgcccaggctatcgcccaccagcatgacgttaagcccttcatcagcaaagagtttggcgaagctatagtcataagcggtgatggtcgcgaaacgttttttttcctgtttgtacttctgcagtaaggagatggtggtcggtttcataacgtatcctgataaattgatgttgtgctgtctggcattttatcagtcacattggtgggggcaatgatttatccgtagcagcactgccagaaggtgacagtgctgctacgttatcagggataggttacctggaaagtactggtggctttaaattcgccgggttcgatagcaatattcccgtcttgctttaatgttgcctggaaatgaagaggctgacttgtgccgttaccttgattagggtaaaccccatcggaggtgtcatcttcggtttcataatctatataaacagaattcgtatcattaggttttaatgtcattagcggatttttactggttgctaaaccttcaatgagtacgccaacgcctttggcggcagtgcttccagtaagcgtattaccaagcagttgtgtgttttgagtacctacttttccagtgacgagttttgtttcaatattacgcacacgaatacaattctgaaggctgatatcaaagggaacaggactagcgccatttttaattgtcccagagctatattctcccattctaaccgtactaccattgacacttggcccggtaagtatggaggtaaaacatgttggtaaggttaatttgacattattcagtgtgaaattgacataaatgtggttgctgtgatctacaacttttgtaccaggactgtaggccttaaagctataaaggtaattactactactggataactggacttgctgattaagtgtaggatcgaaattagtatctgtataaaattcaacagttatgttgtgtactataccaccaatagcccaaaacttatcgtagtcgtctgctttgttgcaacccttagtttgtagatcgctgtctgtgacggaaaagaaaaattcttggttggaaggatctccgatatagattcctgggctttgaatgtcagttattgtatcgtatgcagaccagaccctacttattaacatggtgtaatacagaccaggaacagatgtattaaatagtttatgtccgccataatctttaccactatagaccatggcattttcaatagttattggaccaggattcgctctgccagatgtattgcagtaaagaataccaccaccggtacctgtatccaggtaactccagtacatttttaccccagtcgggccgagctgcgtgggtttataaaaaaccaagttgcttgctgtacttgtgtaattaaaggtcatctgtgcggcagtggaggggcctcgatagttatcaactcctgcattatttcccacaataaaacttgtatatgcactgactgtattacaacaagaatacagtgctaaaaaaagaatgtacctgaagatagtcttcatttttactccaatgtttctttattgttatggtttgcgctgtttttgtttgttattcgtagtaaatatccactaacacatggctcataagttgaccagatgtaacactcaatgcaggatcgattttttgcattcgggtgctaaatttccaggaactaccattcatgtcatcgctcattactggataaacggaacgagatccgccactagcattaagaacattgaatgtattcgcgctatcctgagtagaaaatataactactcctacattacttgctccactgctaatttcattagcaaatatttgcctagagccagcagccatgacaccgctaagggctctaaaatcaatatgtaactgatttagcacatcgccagttccctgtaatgcacagtcggatacagtgatagtgaactcttttccacctggttgataactttcaggagtaacattaccactaaaatatcccaccccaacgacgccaagatcaatattaccctggttactgattccgcttttgcaggtgctgttttttacattggcaacaaggtcaatatcctgtccagcaatggctggacaggcgatgcaaaacagtaaactcagaaacagaattattctcttcatcagcttacgttgagtgggatgcatatatagttcctgaatctgtaagtctgttagttataggttactgtaaatgtggctggtgcagaaaacttacccgcagtgacattgtttacggttttatttttttccacgaccaggcgtgcactcatcggataataaacgaccgcattggctgcagtggagattgttacctcttgacttgctggtgttacacagctaaattgtgttgcactccctgttgccggagttacagtgctccagacttcaacggcgacagcacttgctttatctgcggctgtggaaccatttgcaaaccccgcaccgtcattagcagttccctcgcatgtggctcgcttggttaattttatttgcgcttttttattggggatacccgcacagtctttgaatttgagtttgaatgtttttactttggtcttggcattgatttcagaaatatatacatcaccaaaatcaacaacagaaatgtcctgatcagagtcatttactaatgtagcggtacaagtacccatttctacagtagtaataacggtcagtccaatactgtctgttgccgcataagagagtacgctgaacaaactggcagccaaaacgacactgctggataatccataacgtaaatttttaaatgtcatcataattatccttcttattgatagatgaaattaaacgtcgccagtgcacgaaaattccccggtacgccttgccctgcatctgtttcacgtagcgcaacggtcatttcaagacccttatcgggctgcatctcgtctgtgctccagcgtatcttttccgcactgttaggtttaaggaaagtggcatcatcagtagtccgttttttgaaacccataccgatattacttgtcgtgctagaactatcaccagactgcggtataataagcttaggactgctactacttgcatttccggtcagagtggtatcaatccaactgatgccactgctgcacccactggcaaccagtttaaaatcagcctgagattctgtcgttttattcgcgatcttatccagacccatcttagggattctcaatgtgtagttattattgccatcattcgtgacgttattaccagtaagtgtgatgttacaggttgtcgctttgacagtggctgtaaactctacattaatatccgttgcaaatacactgggacttaataatattcccatcagtatcactattttatgtggcgttgtttttatcatttgacgtcccttgtagttactgaatctgacaccgaattccattcagaataatagattgtgctattttttctgcttctgggctttgttgataatgcgcaagacaacttacgggtttactttgttcgagccatttaatgctgatatttccctgctgctcaataccacgaacaaatgcttgtccaccctgtccaacattaccaatgacattgccttgctcatcataaatatctgcagcaaatggaatatttttaccatcacttcgtgtgatgttcataatggcactttgcccttgcacggtttcaaaatcagcaaagacgacactaccctgacgcggtacagctactgcactggtactttttaattcaacatcgttctcaagatcgttgatatccagcgcgatacggttttcatgataaggagaaagagcgctggtgacaccataaccccatcgatcgatagtactgttgccataatttattcgcgctccttgagcacctggagcctgaactaccgccagtgtatcggagtcgctaaaactatcattactgaaagtcagtccaccgctatgcaatacaaaaccaccgtcggtgctgagagaaacttgacggctgttatcgctatttgcagaaatactacctgccagcgttccccatggactctcatagctggcataacccccaacataactcaaatctttgctggctttattcatcgtatagccagtattcacgctataactgacgcgagcgttatcgctatagccactgctgctaacgttgagttggttattacccttaaagtcactgcttatttgagtatcaatactctggaaaccactagtacgttgttcagtgccaagtaatttttcaattggaatggtgaaactaagataaacgctatcgtcagtgtcgccgtcttcattccaactacgctgggcactgacactgtagctgccccaggatgtactgttactgtagccaatagagtaattgctacgattttgtccggaagcccagtaatcggaccaacttccggaaagataaaaactaccgtaatcttttttctcaaatttcaacggttggttaatactgaccgtaacctgatttttcatgcgactgtaattacgcatggatttcggttcaagatcttgttcgggatgtttcacttcatcaattagagttagtgcatcattaagaccaaggtaattctgtgtgctatagcgataggccgcgatattcagactagtacttgtttcttcgaataacttgttccaggaaacacgataactttgcccctggtatgttttatcatccgggatacgaacattggaatgagtcacatcgaaagaaaatgcaccaacactagtattcagaccaagacctaacaaaccagcggtatagttattatcggttatctgaataccggtataacccgtcagatagttattcaggccgtagtagtagcttgcttgaaataaattaggctcatcctgaatatcatcttttaagacctgaccgccgctaatatcccaacgtccaacgccagggcgtaacatttgaacaacggaactgaaaggttggctgaatgtccgcttactgccatcggattcttcgatggtaacaataagatcgctgccgtacccactcggactcagatcatcaatgacgaaagcgcctggcggcaccgtcgtttcataaatcttatagccaccttgcgtaatagtgactttggcgttggtattggcaacgccatgaatgataggcgcaaagctggctaaagtcggaggcaacatgcggctgtcactgtataaacgaatgcctcggatactgacggaatcaaaggtttcgcccgtcgtataagactcaccaagaatgagttgagaacgcaggctggcgatatcacgctgaacataccgattcttaaaatcataattactgccagaatcggtcatccagttgtagttgccgctggcacgcagtcgccatgcacctaaattcatcccaccgttaaatgcagcataaatgctttcattttttcgaccaggggtttcactatgatatccgttgaggttgtaactcaacatggccgcattaatgccgttttcccataagcttggatcaacatagttttggtaatttttcattacccaggcttgaggaacgtctatatccagacgttgatcgttaacgtcataacgaacagaagcctgagggataatttccgtcaaattgaggcaattgccgagcgtttcatccctggcaagcagaacggctttttcgttatttatatcgggagaattaatatgaaactgcaataaattctttaatgtgatacaagcctgggcgttcttttttccttcaattgcgacaaatgtaatactttggttaatgattggttggtcgtttacataaacactgacgtcgtaaacacccggtatagcggggttaccttcactgtaccggctgagatcaatattagatgcattctgccccatcaggaaggtatggtcatattcaacgagttcagcactgaaagcagtattgcaatacagcagcgcgcaaaacgtggcgatacgggtcagatgatgataatttttagtatattctatagtcacgctatgcttcctgcggaattatatccttgcctgattacagcctggcattaccttcaattgcgccaccaaagtcattaatggcgtaaaaatgcacttttgcagaattcgctttgccattaaggccattgactttcatgacctcatcactaaatggtgcaatcattttcacatcaatcggatagcgtttaccgctagcttctaaatcaccactgctaaaagagacgtagtaaggggttggattggtcactcgtaaactcgccttaccttcactaccactccagaaccacttcagggctaacggggcttcagagggatttcccttcaatccatccgggcgatagaaaagttttatacgtgtgcgaaatgccagttgcagcaggctttgattcgcgaccttttctgcatctggttttggtggaacttccagtacgttaaaccagaacacgctctctctgtctttaggcagactggtgctggctgtgtacattaatttgattgtttgcccacgtttggcatcaatacggcttactggcggcgtagcagtaaaagggactgtaatactgccaggctcagcgttgtcatcgccagtatctaaccaactctggacaagcaacgggttattccctttattttccagacgtacgttgacacttttttgatcgcttttatatattacgcgagtaccgctaatgacaatgtccgcaatagagctactactaaaagccatacaggttacgaagcataaagctgttgtatgtttggtgttaaaaaacataaaccatccctgatagagttaattaaaacagggaataatataaaatagaaattattattccctgtatattcattcaatcaatttaactggtgaatacttactgataagtaatggtgtatgcagtgttagtttttacataaccagcagttgctgtttggtctgcgacggcacgaacgtaagacgctttaaaatcataaacagcagattttgtcgttgcatccagggctttagtatacacatcgccagggttgttaatttgaacctgtttgatagtggaaccatcaatattgtgtagagcgatattaacgccgtcagatgggttgttaatagacatgtcgttgttcaaagtccctttgctgttaccaaagaaaacagaaccgaaggtcattttagccgtgctacctggattcggatttgctttgctgcagtcaacggtgatgctgaaaggtttagctttagcgccaacggtgtcattcagtacgccagcatcgatttcaccaacggttgcggtttgcagcaggatcagaccatccttgttaccgccgtcaacgcgggtttcacaggtgttatcaacaaccagaccactgatatttaactgaccgccgtccatatcagcagaagcagtacctgcaaccatcgccagcataagaccagacagggcaaaacctaattttttagacataaaaatcctttaataaaattccattagtcagactacatgtttgaagaatgactattcatgacacaaataggagaaacaaatgttagatattaatgagcaatgatatttgttacccaaatttacaaccattgttcattaggtcgcctattgtgcactttagaagcttttgaacaaattaaatttacttaattcaaaattaagtaaaaataagttcacaagtgcaattggttagggtatggagatgggattgatatttatttataggaagttatattatttccgcaaagagatgtttaaactaaaatcgtaattaaggaaagagatgagatatgattttcagaaaatatttatattcgcaatataaataaattaccatttgtttaatttgtcaaatgctcttgtatgtaagatttgacgcaacatctccccatcaggaaacaccaactccggcgcgatttcaaacagcggccacagcataaatccacgattcttcatatcgtagtgcggaacggtcaggcgttcagtatttatcacttcattaccaaacagcatgatgtcgagatccagcgtgcgtggtccccagcgttcagctttgcggacgcgaccttgctgcaattcaatacgctgtgtgtgattgagtagctcttcaggtgcaagagaggtttccagcgccacggctgcgtttaagtaatcgggttgatcttgcggccccagcggtggggtgcggtaaaagctagaaacggtaagaatgtggctttcagggatatcgcctaatgctttcagggcagcattgacctgctccagcggagaggccagattgctgcctatggcaatatacgccactgtcatgcggtaccctcacgacgtggtgcgcgtttgcgtggacgacgagtacgacgacgcggactcggttcttcatccagctcgttgagcatccctttttggtctggtggcgcggaaacctggaactcaccccaccatttcaccagacgctgcagttcagcgttacgctcaacttcagctcgcaaggccaacaggtcataagccgcacggaacttaggatgctccagcagtttccatgcgcgtttaccctgacgacgggacatacgcaactgcaactgccagatatcgcgggttaatgtcgtcagacgtttcgggattgccagactacggcaggcttcgtccagcacgtcgttcatcgccagcgcgaaagcgtcgtgataggtcaggccgctttcctgggcgatcttctgtgccgtctccagcagtgggtaccagaacatggcggcaaacaggaacgccgggttcacgcgcatatcgttatggatacgcgtatcggtattcttcagcacctgttcaatgatccgctccatcgggctgtcgccattttccgtgaagtagcgggtaatggtcgggaacagcggctggaacagatgatattcacacaacagcttataggtttcgtaaccgtagcccgcttgtagcagtttaaggctttcttcaaacaggcgtgccggtgggatatcgttcagcagggtagcgaggcgagggatcggttctgcggtttccgggctgatgcgcatacccaatttggcggcaaaacgtaccgcgcgcagcatacgtaccggatcttcacggtagcgcgtttccgggttaccaatcagacggataacgccgtccttcagatccttcatgccgccaacgtaatcacggacggtaaaatccgctacgctgtaatacaggctgttgatagtgaaatcgcggcgctgggcgtcttcttcgatggagccgaaaatgttgtcgcgcagcaacatgccgttttgcccgcgttgggaggtcgtgcggtcgctgacgttaccttcgtggtgtccacggaaggtcgcaacttcgataatctccgggccaaacattacatgagccagacggaaacggcgacccaccaggcggcagttacggaacagtttgcgcacctgctcaggcgtggcgttagtggttacgtcaaaatctttcggctttttgccaagtaacaggtcgcgcacgccgccgccaaccagccaggcttcgtatcccgctttattgagcctgtacattaccttcagggcattttcactgatatctttgcgggaaatagcatactgctcacgcgggatcaccgtcacctgtggacgggcgactgcctgttcagcctcgctttcctcgcggcttagcaccttgcggcaaaaattagcgactcgggtaaaaatagtacacctcggtagtgtcaaacatcattcaggacaaaaaaatagcggctaatcatagctcagcaactcgcattactgaatgtactatttacaattgcgctctcgggcacggcggtaagccgccagtttttgacggcactctgaaggatttgctcgacgctgaaatcctgccagtgtgcttctgcctgctgccccagaaattgaagtgccgcgattagtaccgggcgtggatcgcctttcggcaacgcaggcgcatgattctgcttggaaagtttagcgccttgtggattaagcgccagcggcagatgaatgtaatctggcactttccagccaaaaagctggtacaggctgatttgccttactgttggttcaatcagatcagccccacgcactatttctgtaacgccctggaaatgatcatcaaccacaacagccaggttgtaggcgaacaacccatcacggcgatgaatgataaaatcttcccgtgccagtttttcgtcggcgtgaataatgccgcgcagctggtcagtaaattgcgtgaccggatgctgctggcggatacgcactgcggcgttgtctggtccatgatgcaacacccggcaatgaccgtcgtaaataccgccaatgctttgaatacgcgcacgcgtacaggtgcagtaataacttagtccttgttcatgtaaccaggcgagtgcttcacgataggcgtcgtgacgttggctttgccagagaacatcgccgtcccagtgcagaccgtaatgttccagctggcgcaggatagtttctgcggcaccgggaacttcacgaggcgggtcgatatcttctatgcgtaccagccagcgaccttgccgggcgcgagcctgcaaatagctgccgagcgcggcgatcagagagccaaaatgaagctcgccggaaggagagggggcgaagcggccaatatactgtgtgtctgtcatctctttgaacaaaaaataaggcgggagcatttcccgcctgtggtaaacgtgatggaacggctgtaattagccagccatctgtttttcgcgaatttcagccagcgttttgcagtcgatgcacagatcggctgtcgggcgcgcttccagacggcgaataccaatttcaacaccgcaggattcgcagtagccgaaatcttcgtcttccacttttttcagcgtcttctcgatctttttgatcagcttacgctcgcgatcgcggttacgcagttcgaggctgaactcttcttcctgggctgcacggtctaccgggtccgggaagttggctgcttcatcctgcatatgtgtaacggtgcgatcgacttcatccctgagttgattacgccatgcttccagaatacgacggaagtgcgccagctgggcttcattcatatactcttcgcccggcttctcctgatatggttccaccccagcgatggcgagaatactcagggagcttgttttacggttttgcccttcttgcatgttgcttctccttaacacgcactatcgatccccatgttcgggggaaaaatgaggccgctataaatagcagatgcttttccggatagcaattatctaaacgtaacacttgacaactgtgtgaggaaaagcgtatttgcgcacgcgaccagaatgtaaattaaccagttacttactttattacaatgtaaccggcagactttttttaagagccatgccttcagcagaaatttccgctttgtaagccagaatttctacccccctctgttgagcttcactcaatagttgcgcgtatttctcatcgatgtggcgcgcgggactaaaccgtgtaatggcactatgcagcacggcgaaaaagataaccgcacgctggccttcagccgctacgctcatcaactcccgaaggtgtttctgacctcgttcagtgaccgcatcgggaaaatatccctgttcgttctccgctaacgtaacgcttttcacttcaatatagcagtctggacggctatccgcctgcaacataaagtcaatacggctgcgttctgcgccgtattttacttcgcttttcaggctgctatagccactcagttcactaatactttcattaaggatagcctctttcgtcaacctgttagcccaaagcgtgttgacgcaaataaatgcgccgctctggctttgagttaattcccaggtgtgtgggtatttccgtttggtgttgtcactagtgctataccagacggtatcgccaggcgttgcacaaccggtcatcgcacccgtattcgggcagtgtagcgttaattcgcgaccatcgggtgtgatcacatcggctaaaaaacgtttgtaacgctgaattagcgtcgcgcgctgtagagggggagaaaattccattgcgacaatccttgttattgcgttagcgcccagcgttttagcggcgtgtagcgtgtgcgtccacgggcaaagctggaggcgtaaagggtgaactccgtcaccgcatagctccagttaaaacctggcggcgggattgtcaccgcctcgctggcgtcgcgcaataaggtaatatgtggatgaaacggacgattgctttgaaaacaaccgctgcgggcagcctgactacggagcatattcgccagctggattaagccgcgtggcggctgacgcatccctaaccacaccacacggctacgcagccattgtccggcgtcatcaagcgtgagtgtgaaaccaggttgacgaatccgtccggctaaaagagaaagcgccttctctttctcggcgctcacttcgcctaaaaatgccagagtcagatgcaaattatcggcggcgaccggacgtcccgcctcaggtgggaagtgtgtggcgcgccaatggataatctgttcgcggatttctgcaggtaagtcgatagcaaagaacagacgttgcggttcagacatgtgaggcactcggttatgaattaccgcgatgctacaatgtggcgcgaagaatgttaaccctctggagcgttttgtgagcagcttgcccgttgctgccgtcttacctgaattacttaccgctctcgattgtgcgccgcaggtattattaagtgcgccgaccggggccgggaaaagtacctggctgccgctgcaactgctggcgcatcccggcattaacgggaaaattatcctgctggagccgcgtcgtctggcggcgcgtaacgtcgcgcaacggctggcggagctgcttaacgaaaagccaggcgataccgttggctaccggatgcgtgcgcaaaactgcgtcgggccgaatacccgcctggaagtggttaccgaaggcgtgctgacgcgcatgatccagcgtgacccggaactgagcggtgttggactggtgatccttgatgaatttcatgagcgcagcttgcaggcggatttggcgttggcgctgttactcgatgtgcaacaaggtctgcgtgatgaccttaaactgctgattatgagcgctaccctggacaacgaccgcttgcagcaaatgctgccagaagcgcctgtcgtcatcagtgaagggcgcagctttccggttgaacgccgttatttaccgctgcccgcgcatcagcgttttgacgatgccgttgcggtagccaccgctgaaatgctgcgtcaggaaagcggaagtttactgttatttttacctggcgtcggagaaattcagcgtgtgcaggaacaactggctagccgcatcggcagtgatgtattgctctgcccgctgtatggcgcgttgagcctgaacgatcagcgaaaagcgatcctcccggcaccgcaagggatgcgcaaagtggtgctggcgaccaatattgctgaaaccagtttaaccattgaaggtattcgtctggtggtggattgtgcccaggagcgtgtggcgcgttttgatccgcgcacggggcttacgcgactgattactcaacgcgttagccaggcatccatgacgcagcgtgccgggcgcgccgggcgtctggagccgggtatcagcctgcatttaatcgccaaagaacaagcagaacgcgccgcggcgcaaagtgaaccggagatcttacaaagcgatctttccggtttgctgatggaattactgcaatggggatgcagcgatccggcgcagatgagctggctggatcaaccgccagtagtgaatctactggccgcgaaacgtctgttacaaatgctgggggcactggagggtgaacggcttagtgcgcaagggcaaaaaatggcagcgctgggtaacgatccgcgtttagcggcaatgctggttagcgcgaagaacgacgacgaagctgctaccgcggcaaaaattgccgccattctcgaagagccgccacggatgggcaatagtgacctgggcgtggcgtttagccgcaatcaaccagcctggcagcaacgtagtcagcaactgttaaaacgcttaaacgtacgtggcggtgaggcagacagtagccttatcgcgccgctacttgccggggcgtttgccgatcgcattgctcgtcgccgtgggcaagatggacgctatcaactggcaaacggcatgggagcgatgctcgatgccaacgacgcgctaagccgccacgaatggttgatcgcaccgttattattgcagggcagcgccagcccggatgcgcggattttactggcgctgctggtcgatattgatgagttagtacaacgctgcccgcagctggtacagcagtctgacactgtggagtgggatgacgcgcaaggtacgctgaaagcctggcgtcggctacaaatcggtcagttgacggtgaaagtgcagccgctggcgaaaccgagtgaagacgagttgcatcaggcgatgcttaatggcatccgtgataaaggtttaagcgtgctcaactggacggcggaagcggaacagctacgcttgcgtttgttatgcgccgcaaagtggttgccggaatatgactggccagcggttgatgatgaaagtttattggcagcgctggaaacgtggctgctgccacatatgactggcgtacatagtctacgcggcctgaaaagtctcgacatttatcaggcactacgcggattacttgattggggaatgcagcaacgtctggatagtgaattgcctgcgcattacactgtgccgacgggaagccggatcgccattcgttatcatgaagataacccgcccgcgctggcggtgagaatgcaagagatgtttggcgaggccaccaatccgacgatcgcccaggggcgcgtgccgctggtgctggagttgcttagtcctgcccaaaggccattacaaatcacacgagatttgagcgacttctggaaaggagcgtaccgtgaggtgcaaaaagagatgaaagggcgttatcccaaacatgtctggccggacgacccggcaaatactgcaccgacgcgacggacgaaaaagtatagctaaggttggttttctccctctccctgtgggagagggccggggtgagggcatcagcgcgcacgttcaccctcaccctaaccctctccctcaagggagaggggaccgatcgagcacaaattttgagagatatcttcttctgtcttgtaacagaagaacagaaaatcgggcttttgcgcctgaatattgcggagaaaaagcatggccgggaatgaccgcgagccaattggacgcaaagggaaaccgacgcgtccggtcaaacaaaaggtaagccgtcgtcgttacgaagatgacgatgattacgacgattatgatgactatgaggatgaagaaccgatgccgcgcaaaggtaagggcaaaggcaaagggcgtaagcctcgtggcaaacgcggctggctatggctactgctaaaactggctatcgtttttgccgtgctgatcgccatttacggcgtttatctcgatcaaaaaattcgtagccgtattgatggcaaggtctggcaactgcctgcggcagtttatggccgaatggtcaatcttgagccagacatgaccatcagcaagaacgagatggtgaagctgctggaggcgacccagtatcgtcaggtgagcaaaatgacccgtcctggcgaatttaccgtgcaggccaacagcattgagatgattcgccgtccgtttgatttcccggacagtaaagaaggacaggtgcgcgcgcgtctgacctttgatggcgatcatctggcgacgatcgtcaatatggagaacaaccgtcagttcggtttcttccgtcttgatccgcgtctgatcaccatgatctctagcccaaacggtgagcagcgtctgtttgtgccgcgcagtggtttcccggatttgctggtggatactttgctggcgacagaagaccgtcatttttacgagcatgatggaatcagtctctacagtatcggacgtgcggtgctggcaaacctgaccgccggacgcacggtacagggtgcgagtacgctgacgcaacagctggtgaaaaacctgttcctctccagcgagcgttcttactggcgtaaagcgaacgaagcttacatggcgctgatcatggacgcgcgttacagcaaagaccgtattcttgagctgtatatgaacgaggtgtatctcggtcagagcggcgacaacgaaatccgcggcttcccgctggcaagcttgtattactttggtcgcccggtagaagagctaagcctcgaccagcaggcgctgttagtcggtatggtgaaaggggcgtccatctacaacccgtggcgtaacccaaaactggcgctggagcgacgtaatctggtgctgcgtctgctgcaacagcaacagattattgatcaagaactctatgacatgttgagtgcccgtccgctgggggttcagccgcgcggtggggtgatctctcctcagccagcctttatgcaactggtgcgtcaggagctgcaggcaaaactgggcgataaggtaaaagatctctccggcgtgaagatcttcactacctttgacagcgtggcccaggacgcggcagaaaaagccgccgtggaaggcattccggcactgaagaaacagcgtaagttgagcgatcttgaaactgcgattgtggtcgtcgaccgctttagtggtgaagttcgtgcgatggtcggaggttctgagccgcagtttgcgggctacaaccgtgcgatgcaggcgcgtcgtagcattggttcccttgcaaaaccagcgacttatctgacggccttaagccagccgaaaatctatcgtctgaatacgtggattgcggatgcgccaattgcgctgcgtcagccgaatggccaggtctggagtccgcagaatgatgaccgtcgttatagcgaaagcggcagagtgatgctggtggatgcgttgacccgtagcatgaacgtgccgacggtaaatctggggatggcgctggggctgcctgcggttacggagacctggattaaactgggcgtaccgaaagatcagttgcatccggttccggcaatgctgctgggggcgttgaacttaacgccaatcgaagtggcgcaggcattccagaccatcgccagcggtggtaaccgtgcaccgctttctgcgctgcgtagcgtaatcgcggaagatggcaaagtgctgtatcagagcttcccgcaggcggaacgcgctgttccggcgcaggcggcgtatctgacactatggaccatgcagcaggtggtacaacgcggtacgggtcgtcagcttggggcgaaatacccgaacctgcatctggcagggaaaacagggactaccaacaataacgtagatacctggtttgcgggcattgacggcagcacggtgaccatcacctgggtcggccgtgataacaaccagccgaccaaactgtatggtgccagcggggcaatgagcatttatcagcgttatctggctaaccagacgccaacgccgctgaatcttgttccgccagaagatattgcagatatgggcgtggactacgacggcaactttgtttgcagcggtggcatgcgtatcttgccggtctggaccagcgatccgcaaagcctgtgccagcagagcgagatgcagcagcagccgagtggcaatccgtttgatcagtcttctcagccgcagcaacagccgcaacagcaacctgctcagcaagagcagaaagacagcgacggtgtagccggttggatcaaggatatgtttggtagtaattaacatctaagcgtgaaataccggatggcgagttgccatccggtaaaataacatcccatctaagatattaaccctttcttttcatctggttgtttattaacccttcaggaacgctcagattgcgtaccgcttgcctgtaagactcaatgtaagccgtgccaaaatatgatggctaggacgagctagaacccgccagcgtttcgaatattatcttatctttataataatcattctcgtttacgttatcattcactttacatcagagatataccattccatataacggccctgtacgcctggacggataaagcgtttacgcgacaacggatgcccgatgcgacgctggcgcgtcttatcgggcctacaaacggccccgaatcgtaggtcggataaggcgttcacgccgcatccgacaaaccatgctggatcacaacttcgcaaacacccgacgtgcagcatcgatggtgttattgatatcttccatgctgtgcgccacggacataaagcccgcttcaaacgcactcggtgccaggtaaacaccttcgtccagcatcatatggaagaaacgcttaaagcgttccacgtcacaggccatcacatcctgatagcacgtcacggactcggcgtcggtaaagaaaataccgaacatgccgccaacgtggttaacgaccagcggaattccggcttcttctgccgcttccagcagaccttctgccagacgtgttgtcagctcatccagcgtttcgtgaacgcccggctgcgcgacttcattcagacaggcgaaacccgctgccatcgcaatcgggttaccggaaagcgtacccgcctgatagaccggacccgtcggggccagcgcatccattacatcacgacgaccaccgaatgcgcctaccggcattccaccgccgatgattttgccgaggcaggttaaatctggcactacgccgtaataatcctgtgcgccagctagcgctacgcggaaaccggtcatcacttcatcgatgatcagcaacgcgccaaattcgtcgcacagcgcgcgcagacctggcaggaactctggcagcggcggaacacagttcatattgcctgccaccggctcgacgataatacaggcaatctcttgcgggtattgctcaaatgcggcgcgtacagaagccagatcattataagtacaggttaaggtatatttggcgaaatctgccggaacgcccgggctgtttggctggcctaacgtgagtgcgccagaaccggctttcaccagcaggcagtcagcgtgaccatggtaacacccttcaaatttaataattttgtcgcgaccggtaaaaccacgggccaggcggatggcgctcatggtcgcttcagtgccggagttcaccatgcgcaccatatccatggtcgggaccagttcggtcaccagttgcgccattttcacttccatttcggttggtgcaccaaagcttaaaccacgctcggcggcttcaatcacggcattgcggattgccggatggttatggcccagcaccatcggcccccaggaaccgacataatcgatataggctttgccatcaacatcgtacagataagcgccgtccgctttttcgataaacagtggagtgccgcccacgccagtaaaggcgcgaacaggggagttcacaccgccagggatcagctcgcgcgctgcgctgtaaagattttcagacttactcatggagggttcctgattcgtagaaaaagtgaatggctgctattctatgttattcataacaagttaaatactcgtcaaacatcaggctgcttgtactggtgcaatcctgatttcttagagtataaaagttttgtgcatttgaaacattacgctttgcaaaggattttcatggaacgtgcgagtaaaatgccgtcatcttatttgtatgaccaataagtgatcattggatgaaaactgatactccctctttagaaacaccgcaggccgcgcgcctgcgacgcagacaactgattcgccaacttcttgagcgcgataaaaccccgttagccattttgtttatggcggcagtcgtcggcacgcttgttgggctggcagcggttgcttttgacaaaggtgtcgcctggttgcagaaccaacgtatgggggcgctggtacatactgctgataattatccgcttctgttaaccgtcgcttttctctgtagcgcggtgctggcgatgtttggctactttttggtgcgcaaatacgcgccggaagcaggtggtagcgggatcccggaaattgaaggggcgctggaagatcaacgtcccgttcgctggtggcgtgtattgccggtgaagttctttggcgggctggggacactcggcggaggcatggtgttggggcgcgaagggccaaccgtgcagatcggcggtaacattggccgtatggtgcttgatattttccgcctgaaaggtgacgaagctcgccatacgctgctggcaaccggtgctgctgcggggctggctgcggcctttaacgcgccgctggcgggtattttgtttattatcgaagagatgcgtccgcagtttcgctatacgttaattagcattaaagcggtatttattggtgtcattatgagcaccattatgtaccggatttttaatcatgaagttgcgttgattgacgtcggtaaactttctgatgcgccgcttaatacgctgtggctttatctgatcctcggtattatttttggcattttcggccctatttttaataaatgggtgctggggatgcaggatttgctgcaccgtgtgcacggcggcaatattaccaaatgggtgctaatgggcggtgcgattggcggtctgtgtggattgctggggtttgtggcaccagcaacgagcggcggcggttttaacctgattcctatcgctaccgcggggaatttcagcatgggaatgctggtgtttatcttcgtcgcgcgggtcattaccaccttactctgcttctcttccggcgcgccgggcggtatttttgccccgatgctggcgctgggtactgtgctgggaaccgctttcggaatggttgccgttgagctgtttccgcaatatcaccttgaggcggggacgtttgctattgccggaatgggggcattactggcggcatctattcgcgcgccgttaacggggatcattctggttctggagatgaccgataactaccagctcattttgccaatgattattaccggtcttggcgcaacactattagcgcaatttaccggcgggaaaccgctatacagcgcgattcttgcgcgcacgctggcaaaacaggaagctgagcaactggcgcgaagcaaggccgcaagtgccagcgagaatacttgaacgaaataccagggtattagataatggcgattattattgggttagaatttgcccaattgccgatgtcgtttggagcaaaatatgagtgatgacgtagcactgccgctggagtttaccgacgcagcagccaacaaagttaaaagcctgatcgctgacgaagataacccgaatctgaaattacgcgtgtatatcaccggtggcggttgcagcggcttccagtatggtttcacctttgatgatcaggtgaacgaaggcgatatgaccatcgaaaaacagggcgttggcctggtggttgatccgatgagcctgcaatatctggtcggcggttccgttgattataccgaaggtctggaaggttctcgtttcatcgtgaccaacccgaacgcgaaaagcacctgcggttgcggttcttcctttagtatctaatctgttgttcatgtgccggataaactatccggcacatcttctctcttcaacgcccattctcatccagcgcaaacgtcggtagcttaagatgccaacgaatagccgccagccgaatcaatagcgtcacgaccatgcccatcatactggctgtttccagtggtacggaaaatgtgtaataagccgtagcgtggacaataccgccgataatacaggcagttgcgtagatttctgtacgtaaaatcatggggatttcgcgggccagaacatcacgaatgatcccgccgccaacgccagtaatgacgcccatacaaaccgcgattaacggaccggcttccgcattaaaggctttattcacgccaatgccgacaaacaccgccagaccaacggcgtccagcaccggcaacatccattttggtaagcgtcttggctggcgcaccagcacgatggtcagcatgctggtgaccattgcaacgaccagatcggtgggatctttcacccaaaataccgggccgtgatccagcgccatgtcgcgaattgtcccgccgcctactgcggttaccacgcccagtaccagaacaccaaaagggtccatacgcaattttccggctaacaaaacgccggagatggcaaataccgctgtgccgactatatccagccaatagacgagcattgttcaatccccactgagcacctgaaaaggtcaggcgttaatctacctgactaagcgcattacagagctgttgtgcagcgaggataatacgtgggcttgcacgttcaaaccagtcactcgtgagaggaataacgggaattttgagctgttcaccccagtattgtttgattttaggaatttggtccggtccgcctgtaatgacaatcgcctgtgggctgcgtgctaacacctgttcgcggctaacttgcggccagggaacccggctgtctttaaagatgttttctccgccacaaacttcgagtacctggttctgaatgctctcttttccactggtaaatggcggattaatgccgaattgcagaaaaacacgttttttaggtttatcagcatattgcgctttcaattgcgcgtactgatccagcagggattgcgcggcttgttcggccttgtctggttgcggactccagggggccagttgacgtaacgcattggcaatttgttcaatgcttgtcgcatcgacccacatcacttttattcccaggctagccagctggtcaacctgccgctcggcattacctccacgccaggcaatcaccagatcgggtttcagcgcgacaatgcgttccagattcatcccctgccaggtggaaacctgctcaatcttttgcgcttgtggaggatagtcggaatagctgctgaccccaaccggcgtgatcccggcggcaaaggcaagttcagtgttggcgggagaaagcgtgatgacgcgcggcgcggcgttgagccacagtggcgcaagaaaagacagggcgaccagcgccctgaacagactcttagccatgtgcaagtttctgcaccagactctcaaccatcaggctggactgtttagcggcaacagccaggaactcatcgaagctaagatgagactgttgatcggccacgtcggagatggcgcgtacgacaacaaacgggacgttgaaattgtggcagacatgggcgattgccgtcgcttccatctctacagcaatggcctgtgggaagttgtggcggattttcgccagaccaacagaaccgttgatgaaagcgtcgccgctaacaatcaggccacgtacagcgttaagattcagttcggcaatgcaggcctcagcggcagcgatcagtttatcgtcagctttaaagcctgccggacagcctggtaactgaccgtattcataaccaaatgccgtgacatccgcgtcgtgataacgtgcttcgtcgctgacaacgatatcgcccactttcaacgttggtgccaggccaccggcagaaccggtgttaataatcacatctggcttgcagtgttccaacagcaaagtggcacccagcgccgcagcgactttaccgatgccgcttttcagaagcgcaacctcggttccattcagttggccggtatagatttcgcaaccgccgagactgatagtttgacggttttcgattttgtcacgcagcagcgtaacttcttcttccattgcaccaatgatgccgattttcatagatttactcgcgataagcccgatttgaaggcatagtttaccatgcgcttacggggaagcgtatttctcacgcgggagaggacatggcacagattgatttccgaaaaaaaataaactggcatcgtcgttaccgtagtccgcagggcgttaaaaccgaacatgagatcctgcggatcttcgagagcgatcgcgggcgtatcatcaactctccggcaattcgtcgtctgcaacaaaagacccaggtttttccactggagcgcaatgccgccgtgcgcacgcgtcttacccacagcatggaagtccagcaggtggggcgctacatcgccaaagaaattttaagccgtctgaaagagcttaaattactggaagcatacggcctggatgaactgaccggtccctttgaaagcattgttgagatgagttgcctgatgcacgatatcggcaatccgccgtttggtcattttggcgaagcggcgataaatgactggtttcgccaacgtttgcacccggaagatgccgaaagccagcctctgactgacgatcgctgcagcgtggcggcactacgtttacgggacggggaagaaccgcttaacgagctgcggcgcaagattcgtcaggacttatgtcattttgaggggaatgcacaaggcattcgcctggtgcatacattgatgcggatgaatctcacctgggcacaggttggcggtattttaaaatatacccgtccggcgtggtggcgtggcgaaacgcctgagacacatcactatttaatgaaaaagccgggttattatctttctgaagaagcctatattgcccggttgcgtaaagaacttaatttggcgctttacagtcgttttccattaacgtggattatggaagctgccgacgacatctcctattgtgtggcagaccttgaagatgcggtagagaaaagaatatttaccgttgagcagctttatcatcatttgcacgaagcgtggggccagcatgagaaaggtagcctctttagcctggtggttgaaaatgcctgggaaaaaagtcgcagtaatagtttaagccgcagtacggaagatcagttttttatgtatttacgggtaaacaccctaaataaactggtaccctacgcggcacaacgatttattgataatctgcctgcgattttcgccggaacgtttaatcatgcattattggaagatgccagcgaatgcagcgatcttcttaagctatataaaaatgtcgctgtaaaacatgtgtttagccatccagatgtcgagcggcttgaattgcagggctatcgggtcattagcggattattagagatttatcgtcctttattaagcctgagcttaagtgactttactgaactggtagaaaaagaacgggtgaaacgtttccctattgaaagccgcttattccacaaactcagcacgcgccatcggctggcctatgtcgaggctgtcagtaaattaccgagtgattctcctgagtttccgctatgggaatattattaccgttgccgcctgctgcaggattatatcagcggtatgaccgacctctatgcgtgggatgaataccgacgtctgatggccgtagaacaataaccaggcttttgtaaagacgaacaataaatttttaccttttgcagaaactttagttcggaacttcaggctataaaacgaatctgaagaacacagcaattttgcgttatctgttaatcgagactgaaatacatgaaaaaaaccacattagcactgagtgcactggctctgagtttaggtttggcgttatctccgctctctgcaacggcggctgagacttctagtgcaacgacagcccagcagatgccaagccttgcaccgatgctcgaaaaggtgatgcctagtgtggtcagcattaacgtagaaggtagcacaaccgttaatacgccgcgtatgccgcgtaatttccagcagttcttcggtgatgattctccgttctgccaggaaggttctccgttccagagctctccgttctgccagggtggccagggcggtaatggtggcggccagcaacagaaattcatggcgctgggttccggcgtcatcattgatgccgataaaggctatgtcgtcaccaacaaccacgttgttgataacgcgacggtcattaaagttcaactgagcgatggccgtaagttcgacgcgaagatggttggcaaagatccgcgctctgatatcgcgctgatccaaatccagaacccgaaaaacctgaccgcaattaagatggcggattctgatgcactgcgcgtgggtgattacaccgtagcgattggtaacccgtttggtctgggcgagacggtaacttccgggattgtctctgcgctggggcgtagcggcctgaatgccgaaaactacgaaaacttcatccagaccgatgcagcgatcaaccgtggtaactccggtggtgcgctggttaacctgaacggcgaactgatcggtatcaacaccgcgatcctcgcaccggacggcggcaacatcggtatcggttttgctatcccgagtaacatggtgaaaaacctgaccagccagatggtggaatacggccaggtgaaacgcggtgagctgggtattatggggactgagctgaactccgaactggcgaaagcgatgaaagttgacgcccagcgcggtgctttcgtaagccaggttctgcctaattcctccgctgcaaaagcgggcattaaagcgggtgatgtgatcaccagtctgaacggtaagccgatcagcagctttgccgcactgcgtgctcaggtgggtactatgccggtaggcagcaaactgaccctgggcttactgcgcgacggtaagcaggttaacgtgaacctggaactgcagcagagcagccagaatcaggttgattccagctccatcttcaacggcattgaaggcgctgagatgagcaacaaaggcaaagatcagggcgtggtagtgaacaacgtgaaaacgggcactccggctgcgcagatcggcctgaagaaaggtgatgtgattattggcgcgaaccagcaggcagtgaaaaacatcgctgaactgcgtaaagttctcgacagcaaaccgtctgtgctggcactcaacattcagcgcggcgacagcaccatctacctgttaatgcagtaatctccctcaaccccttcctgaaaacgggaaggggttctccttacaatctgtgaacttcaccacaactccatacatcttcatcatcctttaggcatttgcacaatgccgtacgttacgtacttccttatgctaagccgtgcataacggaggacttatggctggctggcatcttgataccaaaatggcgcaggatatcgtggcacgtaccatgcgcatcatcgataccaatatcaacgtaatggatgcccgtgggcgaattatcggcagcggcgatcgtgagcgtattggtgaattgcacgaaggtgcattgctggtacttagtcagggacgagtcgtcgatatcgatgacgcggtagcacgtcatctgcacggtgtgcggcaggggattaatctaccgttacggctggaaggtgaaattgtcggcgtaattggcctgacaggtgaaccagagaatctgcgtaaatatggcgaactggtctgcatgacggctgaaatgatgctggaacagagccggttgatgcacttgttggcgcaggatagccgtttgcgggaagaactggtgatgaacctgattcaggcagaggagaatactcccgcacttactgaatgggcgcaacggctggggatcgatctcaatcaaccgcgagtggtggctattgttgaggtcgacagcggtcagcttggcgtggacagcgcaatggcggagttacaacaactgcaaaacgcgctgactacgcccgagcgtaataatctggtggcgattgtcagcctaaccgaaatggtggtgttgaaaccggcgttgaactcttttgggcgctgggatgcagaagatcatcgtaagcgagttgaacaactgattacccgcatgaaagagtacggccagctgcgttttcgcgttagtctgggcaactattttaccggtcctggcagtattgcccgatcctatcgtacggcgaaaacgacgatggtggtgggtaaacagcggatgccagaaagtcgctgctatttttatcaggatctgatgttacctgtgttactcgacagtttgcgtggcgactggcaggccaacgaactggcgcgaccgctggcgcggctgaaaacgatggacaataacggcttgctgcgacgaacgctggcggcgtggtttcgccacaatgtgcaaccgctggcaacgagtaaggcgttgtttattcatcgtaataccctggagtatcggcttaatcgtataagcgaactgaccgggcttgatttgggcaattttgatgacaggttgctgctgtatgtggcgttacaactggatgaagagcggtaagttatgcgttaaggttgaggcggcgctggctcattcccctcagcccgaagggtagaggggaatgcccgaattaaccgtcagttcgggattatttacgcgttagtttttccagatcggcttcaatctcgctgatcttattggttacgacactctccaggtgacgtaagtcgtcgaggatcttacgcttaagatcaacttcgctgcggtcacgctggcagatttgatcaagctcatcaatgatataccgtagattcgggctgatttcctggacttctttataaccctgacccacaccatcagcgacgaccgttttacgctgacgcggatatttaaacttaacgctcttggcgaaaaactcgcctttgtctttctggaaatagattttcagaatatcgttgttggcttcctgccggaggctgtaacgatcaatttcttcaggattggtaatacccagacttttcagattgtcgtacatagcgttacctcaaaatgagtcagtaaattgtgcttattttagcatttggcctggcccgcccggctcgactgtgatcgcagaaagcctttttcttccagacttctatcatggcgtaaaaatcaaaaaattacctgctttattctggtgataaaattcacgatttacaccagttccagcatcgttacttccgggcggcagttcagacgcaaaccatacaaactgcccacgccacgggttgtgtagatgtgtctttcgccaaaggcatttaatccggcgacgtaacgtttatcttcgacaggggcaaaaggttcaccaaccaacggtacgcgcagttgcccgccgtgagtatggccgcacagcatcagatcccagggttcatcacgcatgacttctttgctgtcgggattatgcgccagcaccagtcttggcagattggcttcgctggcgggaggcggtttgcattgtccggcccataagtcaccagtgcctaccagttcgaattgcctgttcggcgtggcgatcaccgtagcctggttaaacaacaccgtgatgcccgcacttttcaacgtctcgccaattaagtgatttttttctgtaccaacagggcgatcgtggttgccgaagcaggcaaacgtcggcgcacattcggcaaggggggagagtacgtcactaaacgcgctaaaattcaggctcatatcaaataatacgtaatcgccgcccagtaatatcaaatcgggcttttgttctatgccaagagcaatcgcgtcagaaatcaggcttaaaggaacaaaacgagagtaatggagatcggccagaaaaagaattttgaatggtgctgcgttgtctttaaaaaaggcgaggcggtgacggattaattcaaaccagcctggctcacagtaatgcatataaccgaaaccactgctcgtggctatcgtcgcggcagtagcctgcaaaaatcggcggcgactaatcatcgctcatccctgcaaaaaaatcgggcagcgtcgtgctgcccgtgtgcatacttttagtcgatggtacgcagcagttcgttaatgccgactttgccgcgagttttcgcgtcaactttcttaacgataaccgcacagtagaggctgtatttgccatctttactcggcagattaccactaacaaccacagaccccgccggaacgcgaccgtagtggatttcgccggtttcacggtcgtaaatacgggtgctctgaccaatgtatacgcccatggaaatgacggaaccttcttcgacaatcaccccttcaaccacttcagagcgcgcgccgatgaagcaattatcttcaatgatggttgggttagcctgcagcggttccagcacgccgccgatgcccacgccaccggaaaggtggacgtttttaccaatctgcgcacaagaaccgacggtcgcccaggtatcaaccatggtgccttcatcaacatatgcgccgatgttgacgtaagacggcatcagcacggtgttacgggcaataaacgcaccctgacgtaccgccgctggtggcacaacgcggaagccttctttctggaaacgtgcttcgtcgtagtcggcgaatttcatcggcactttgtcgaagtagcggctttctgccccttcgatcacctgattatcattaatacggaaagagagcagcaccgcttttttcaaccactgatgcgtcacccactgaccgtcaattttttccgctacacgcagtgcgccggaatccagcagggcgatcacctgatttaccgcttcgcgggtaacggtgtctgcattggctggcgtgatctcggcacggcgttcaaaagcggtttcaataatgttctgtaactgctgcattgttaaactcttttcatatcagtaaacacatcaccctttatcgtttggattgagggcctctgtcaaccgctgatgcacttcctgctgcaactcgttattaagcgcacgccggtcagcggtggcaattatgaataaatcttctactcgctcgccaatggttgtaattcgggcaccatgaaggctaattcccagatcggcaaaaattttcccgactcgcgccagcagtccaggttggtcgagggcgatcagttcgaggaagcttttgcggtcggtatgggtcggcaaaaacgttacttcggtttcaacagtaaaatggcgtaatttggcgggttggcgacggggctgcggtggctgccagctactttgcgtcagtacttgctccagaccaaaccgaataacctcatgacgatctgcggacagcgggttgccatcgggttccagcacgataaaggtatccatcgccataccgtcgcgagtggtgaaaatttgtgcgtcgtgaacacttaaattgcggcggtctaattcggcacagacggcggcaaacagataagggcggtccgggctccagataaaaatctcggtgcctccacgcgtagcctgcgggctaagcaataccagcggtttgcttaaatcatgctgtaataaatggcgggcatgccaggccagttgatttgggctatggcggacaaaatagttagcacgacagcgactccaaatttggtgcagcgcctcttcgtcgatgttatccatgcgcagtagtgccagtgcctggagttggtgatggcgaacccgttcgcgcatatccggcgtgttttgcattccgcgtcgtagctgcttttcggtggcaaagtagagctcacgcaacagactttgcttccagctattccacagcgtttcgttggtggcgcaaatgtcagccacagtcaggcataccagatagcgcagacgattttccgtttgcacttcttcggcaaactgcttgatgacttccgggtcctgaatatcgcggcgttgggcggtcacgctcatcaacaggtgctggcgaaccagccaggcgaccagctgtgtttcgcgactgttcagcccgtggagttcggcaaaatgcactacatcctgagcaccgagaatggagtggtcgccgccgcgtcctttggcgatatcgtgaaacagcgcggcgatgaaaatcagctcagtactcggcaggcgcggccagacgtccacacacaacggatggcgctggcgcgtttcttcactggcaaaactctccagtttcagcatcacgcggatagtatgttcatccaccgtgtaggcgtggaacagatcaaactgcatctgcccgacgatatggctccattgcggcatatacgcgccgagcacgctatggcgatgcattggcaatagcccgcgccgcaccgctccggggtgacgcagaatgctcaaaaacagttttcgtgcttccggaatattacacagcggttgttgcagatggcgacgggcatggcgtaactggcgcagcgtggtggagtaaatgccggtgatcgcactgttgtgcaccatggtgtagaacatacgcaagatggcttccggctggcgcataaatagtgtttcatcacgcaggtcgattagcgtaccgcgtagctgaaactcatcgtcgattggacgtggtttttcgtcggcgggaagggcgaggatggcttcatcgaacagttgcagcagcatctggttgagttcactgacgcggcgtgtaacgcggaagtaatccttcatcatccgctcgaccggttcgttaccttcaccactgtaattcagacgctgggcgacgctaagctggcgatcgaataacaggcgattatcgtaacggctgacgaccagatgcagggcaaagcgaatacgccacaatatatgcagacattcgtttaattccgcccgctccgcactggttaagaagccaaacccgaccatttcatccaggcttgttgcgccaaaatgacggcgggccacccattgcagagtgtggatatcgcgcaagccgccagggctgcttttgatgtctggttcaaggttgtagctggtgccatggtaacgctgatggcgctggttctgttcttcaactttcgccgcgtagaacttgtcggaaggccagaatccttcgctgaaaatatgtttttgcagttcgaggaacagcgcaacatcgccaattaataagcgggattcgattaaattggtggcgacggttaaatcgcttaacccttccagcatgcactcttcaagcgtgcgcacgctatgaccgacttccagctttacatcccagagcagcgttaacagctcgcccactttttgcgcctgatcgtccgggagctttttacggcttaaaatcagtaaatcgacgtcactaagtggatgcagctcgccacgaccgtagccaccgacggcgaccaatgccaggtcggcaatctggctgaatcccgcttcaatccataatcgttgcaggagctggtcgataaactcggtgcgcgcctcaatcaactgttctgcagagatcccattgtcaaaggcatcacccagccaacgctggaaagtatcgatatgggcttttatcccaccgacggttaattcatcacggggccagacgcatggattttgcggttgaccgggcagggtggggagagcggtgtttgcgtactgttctggaagggtattcattgtgcgccacccataagattaaattatcgcattaaaaaagccggcattcgccggcttcatcttattcgtcgtggctgattatcgccgggatggtgtcatccttgcgtagcgtcagaatttcgcagccgttatcagtcaccacaatagtatgctcatattgtgcagacaagctgcgatctttggtttttaccgtccagccatctttcatggtgcggatctcttttttacccgcgttgaccattggctcgatggtgaacgtcatcccaggtttcagtacgacgttggtttcacgggagtcatagtgcagcacctgcggttcttcatggaagccgcgaccaataccgtgtccgcaatattcacgaacgacggagaagccttctgcttcgacaaatttctgaatcgccgcaccgatttcgcgcagattaatgcctggttttaccatgcgtagcgccaggtacaggctttcttgcgtgatgcggcacagacgttcgcccatgatggtcggcttaccgacgataaacattttgctggtatcgccgtggaaaccatctttgattacggtgacatcaatgttaacgatatcgccatctttcagcagcttagcatcgtccgggataccgtggcacaccacttcattaatagagatgcaaacggatttcggatagccgtgatagccgaggcaggcagaaaccgcgtgttgttcattaacaatgtaatcattacagatgcgatccagctcgccggtgctgacgcccggtttaacatacggttcgatcatctccagcacttcggcagccagtcggccagcgacgcgcattttttcgatatcttctggggtcttgatagagatagccattaattctgtccatcagcgtcggtgataccgacaatatatatgtaagtgccgtcaatggtatcacacccgggcaaattgagaatcattctgaatttcgccaaacgtgccactgaaggttttctataatagaaaattcgacgtctgatgctgtacacagcgccaacaattattggtgtccacgacgtatttgtggtataaagcgcgccggacttccgatccatttcgtatacacagactggacggaagcgacaatctcactttgtgtaacaacacacacgtatcggcacatattccggggtgccctttggggtcggtaatatgggatacgtggaggcataaccccaacttttatatagaggttttaatcatggcaactgtttccatgcgcgacatgctcaaggctggtgttcacttcggtcaccagacccgttactggaacccgaaaatgaagccgttcatcttcggtgcgcgtaacaaagttcacatcatcaaccttgagaaaactgtaccgatgttcaacgaagctctggctgaactgaacaagattgcttctcgcaaaggtaaaatccttttcgttggtactaaacgcgctgcaagcgaagcggtgaaagacgctgctctgagctgcgaccagttcttcgtgaaccatcgctggctgggcggtatgctgactaactggaaaaccgttcgtcagtccatcaaacgtctgaaagacctggaaactcagtctcaggacggtactttcgacaagctgaccaagaaagaagcgctgatgcgcactcgtgagctggagaaactggaaaacagcctgggcggtatcaaagacatgggcggtctgccggacgctctgtttgtaatcgatgctgaccacgaacacattgctatcaaagaagcaaacaacctgggtattccggtatttgctatcgttgataccaactctgatccggacggtgttgacttcgttatcccgggtaacgacgacgcaatccgtgctgtgaccctgtacctgggcgctgttgctgcaaccgtacgtgaaggccgttctcaggatctggcttcccaggcggaagaaagcttcgtagaagctgagtaataaggcttgataactcccccaaaatagttcgagttgcagaaaggcggcaagctcgagaattcccgggagcttacatcagtaagtgaccgggatgagcgagcgaagataacgcatctgcggcgcgaaatatgaagggggagagcccttatagaccaggtagtacacgtttggttagggggcctgcatatggccccctttttcacttttatatctgtgcggtttaatgccgggcagatcacatctccgaggattttagaatggctgaaattaccgcatccctggtaaaagagctgcgtgagcgtactggcgcaggcatgatggattgcaaaaaagcactgactgaagctaacggcgacatcgagctggcaatcgaaaacatgcgtaagtccggtgctattaaagcagcgaaaaaagcaggcaacgttgctgctgacggcgtgatcaaaaccaaaatcgacggcaactacggcatcattctggaagttaactgccagactgacttcgttgcaaaagacgctggtttccaggcgttcgcagacaaagttctggacgcagctgttgctggcaaaatcactgacgttgaagttctgaaagcacagttcgaagaagaacgtgttgcgctggtagcgaaaattggtgaaaacatcaacattcgccgcgttgctgcgctggaaggcgacgttctgggttcttatcagcacggtgcgcgtatcggcgttctggttgctgctaaaggcgctgacgaagagctggttaaacacatcgctatgcacgttgctgcaagcaagccagaattcatcaaaccggaagacgtatccgctgaagtggtagaaaaagaataccaggtacagctggatatcgcgatgcagtctggtaagccgaaagaaatcgcagagaaaatggttgaaggccgcatgaagaaattcaccggcgaagtttctctgaccggtcagccgttcgttatggaaccaagcaaaactgttggtcagctgctgaaagagcataacgctgaagtgactggcttcatccgcttcgaagtgggtgaaggcatcgagaaagttgagactgactttgcagcagaagttgctgcgatgtccaagcagtcttaattatcaaaaaggagccgcctgagggcggcttctttttgtgcccatcttgtaaattcagctaacccttgtggggctgcgctgaaaagcgacgtacaatgtcgctagtattaattcatttcaatcgttgacagtctcaggaaagaaacatggctaccaatgcaaaacccgtctataaacgcattctgcttaagttgagtggcgaagctctgcagggcactgaaggcttcggtattgatgcaagcatactggatcgtatggctcaggaaatcaaagaactggttgaactgggtattcaggttggtgtggtgattggtgggggtaacctgttccgtggcgctggtctggcgaaagcgggtatgaaccgcgttgtgggcgaccacatggggatgctggcgaccgtaatgaacggcctggcaatgcgtgatgcactgcaccgcgcctatgtgaacgctcgtctgatgtccgctattccattgaatggcgtgtgcgacagctacagctgggcagaagctatcagcctgttgcgcaacaaccgtgtggtgatcctctccgccggtacaggtaacccgttctttaccaccgacagtgcagcttgcctgcgtggtatcgaaattgaagccgatgtggtgctgaaagcaaccaaagttgacggcgtgtttaccgctgatccggcgaaagatccaaccgcaaccatgtacgagcaactgacttacagcgaagtgctggaaaaagagctgaaagtcatggacctggcggccttcacgctggctcgtgaccataaattaccgattcgtgttttcaatatgaacaaaccgggtgcgctgcgccgtgtggtaatgggtgaaaaagaagggactttaatcacggaataattcccgtgatggataaataagggtaagattccgcgtaagtatcgcgggggcgtaagtctggttataaggcgttattgttgcaggcagtttggtcacggccagcgcgcagcaaccggagcgtacaaaagtacgtgaggatggcgagcactgcccggggccaaaatggcaaataaaatagcctaataatccagacgattacccgtaatatgtttaatcagggctatacttagcacacttccactgtgtgtgactgtctggtctgactgagacaagttttcaaggattcgtaacgtgattagcgatatcagaaaagatgctgaagtacgcatggacaaatgcgtagaagcgttcaaaacccaaatcagcaaaatacgcacgggtcgtgcttctcccagcctgctggatggcattgtcgtggaatattacggcacgccgacgccgctgcgtcagctggcaagcgtaacggtagaagattcccgtacactgaaaatcaacgtgtttgatcgtagtatgtctccggccgttgaaaaagcgattatggcgtccgatcttggcctgaacccgaactctgcgggtagcgacatccgtgttccgctgccgccgctgacggaagaacgtcgtaaagatctgaccaaaatcgttcgtggtgaagcagaacaagcgcgtgttgcagtacgtaacgtgcgtcgtgacgcgaacgacaaagtgaaagcactgttgaaagataaagagatcagcgaagacgacgatcgccgttctcaggacgatgtacagaaactgactgatgctgcaatcaagaaaattgaagcggcgctggcagacaaagaagcagaactgatgcagttctgatttcttgaacgacaaaaacgccgctcagtagatccttgcggatcggctggcggcgttttgctttttattctgtctcaactctggatgtttcatgaagcaactcaccattctgggcagcaccggcagcattggttgcagcacgctggacgtggtgcgccataatcccgaacacttccgcgtagttgcgctggtggcaggcaaaaatgtcactcgcatggtagaacagtgcctggaattctctccccgctatgccgtaatggacgatgaagcgagtgcgaaacttcttaaaacgatgctacagcaacagggtagccgcaccgaagtcttaagtgggcaacaagccgcttgcgatatggcagcgcttgaggatgttgatcaggtgatggcagccattgttggcgctgctgggctgttacctacgcttgctgcgatccgcgcgggtaaaaccattttgctggccaataaagaaagtctggttacctgcggacgtctgtttatggacgccgtaaagcagagcaaagcgcaattgttaccggtcgatagcgaacataacgccatttttcagagtttaccgcaacctatccagcataatctgggatacgctgaccttgagcaaaatggcgtggtgtccattttacttaccgggtctggtggccctttccgtgagacgccattgcgcgatttggcaacaatgacgccggatcaagcctgccgtcatccgaactggagcatggggcgtaaaatttctgtcgatagcgctaccatgatgaacaaaggtctggaatacattgaagcgcgttggctgtttaacgccagcgccagccagatggaagtgctgattcacccgcagagtgtgattcacagtatggtgcgctatcaggacggcagtgttctggcgcagctgggggaaccggatatgcgtacgccaattgcccacaccatggcatggccgaatcgcgtgaactctggcgtgaagccgctcgatttttgcaaactaagtgcgttgacatttgccgcaccggattatgatcgttatccatgcctgaaactggcgatggaggcgttcgaacaaggccaggcagcgacgacagcattgaatgccgcaaacgaaatcaccgttgctgcttttcttgcgcaacaaatccgctttacggatatcgctgcgttgaatttatccgtactggaaaaaatggatatgcgcgaaccacaatgtgtggacgatgtgttatctgttgatgcgaacgcgcgtgaagtcgccagaaaagaggtgatgcgtctcgcaagctgaggataatccggctacagagagtcgcgctatttgttagcgtagggcttcagtgatatagtctgcgccatctgatcgtaagtagttggctttataaggtcagatatgccgtggttttacacggcttttttttgtataggcttcagtattcctgagtaccgtaaaccctgtcagggaataaaaaacgcgtgatgttgtctgctactcaaccacttagcgaaaaattgccagcgcatggctgccgtcatgttgcgatcattatggacggcaatggccgctgggcaaaaaagcaagggaagattcgtgcctttgggcataaagccggggcaaaatccgtccgccgggctgtctcttttgcggccaacaacggtattgaggcgttaacgctgtatgcctttagtagtgaaaactggaaccgaccagcgcaggaagtcagtgcgttaatggaactgtttgtgtgggcgctcgatagcgaagtaaaaagtctgcaccgacataacgtgcgtctgcgtattattggcgataccagtcgctttaacagccgtttgcaagaacgtattcgtaaatctgaagcgctaacagccgggaataccggtctgacgctgaatattgcggcgaactacggtggacgttgggatatagtccagggagtcaggcaactggctgaaaaggtgcagcaaggaaacctgcaaccagatcagatagatgaagagatgctaaaccagcatgtctgtatgcatgaactggcccctgtagatttagtaattaggactgggggggagcatcgcattagtaactttttgctttggcaaattgcctatgccgaactttactttacagatgttctctggcccgatttcgatgaacaagactttgaaggggcgttaaatgcctttgctaatcgagagcgtcgtttcggcggcaccgagcccggtgatgaaacagcctgatgggggtcgcttttgctgaagtatcgcctgatatctgcttttgtgttaatacccgtcgtcatcgcggcgttgtttctgttgccgccggtggggttcgccattgtaacgctggtggtctgcatgctggcagcgtgggaatggggacagcttagcggttttaccactcgtagccagcgagtatggttggcggtgttatgcgggttattgttggcgctgatgctttttctgttgccggaatatcaccgaaatattcatcaaccgctggttgaaatcagtctttgggctagcctgggttggtggattgtcgcgctattgctggtgctgttttacccaggttccgcagcaatctggcgtaactctaaaacattgcgccttatttttggcgtgctaaccattgttcccttcttctggggcatgctggcgttacgggcctggcactatgacgagaatcattacagtggcgcaatatggttgctctatgtcatgatcctggtatggggcgctgactccggcgcatatatgtttggcaaattgtttggtaaacataagctggcaccgaaggtttctccgggtaaaacctggcaaggctttatcggtggactcgctactgcagcggtaatcagttggggttatggcatgtgggcgaatctcgacgtcgctcccgtcaccttactcatttgctctattgtcgcagcgttagccagtgtgctcggcgatctgaccgagagtatgtttaagcgtgaagcaggaattaaggacagcggtcatttaattccaggacacggtggtattttagatcgtattgatagcctgacggctgcggtaccggtctttgcttgcttgttgttactggtattcaggacgctttaacggaaggtaatatgctgagttttctctgggatttggctagcttcatcgttgcactgggtgtacttatcaccgtgcatgaatttggtcatttctgggttgcccggcgttgtggtgttcgcgttgagcgtttcagtatagggtttggtaaggcgctctggcggcgaactgataagctcggcaccgaatatgttatcgccctgatcccgttgggcggttatgtcaaaatgctggatgagcgcgcagaaccggtcgttccggaactccgccaccatgccttcaataataaatctgtcggccaacgagcggcgattattgccgcaggtccggttgcaaacttcatttttgctatctttgcctactggctggtttttattattggtgtgcctggcgtacgtccggtggttggcgaaatagcagccaatagcatagctgcggaagcacaaattgcaccaggtacggaactaaaagccgtagatggtatcgaaacgcctgattgggatgccgtgcgtttgcagttggtcgataaaattggcgatgaaagcaccaccattacagtagcgccatttggcagcgaccaacggcgggatgtaaagctcgatttacgtcactgggcgtttgagcctgataaagaagatccggtatctagcctggggattcgtcctcgtgggccgcaaattgaacctgtactggaaaatgtgcagccaaacagcgcggcaagcaaggcaggtttgcaagcaggcgacaggatcgttaaagtcgatggtcagcccttaacgcagtgggtgacctttgtgatgcttgtccgggataacccgggtaaatccttagcgttagaaatcgaaaggcaggggagtcccttgtctttgacattaatcccggagagtaaaccgggtaatggtaaagcgattggttttgtcggtattgagccgaaagtcattcctttgccagatgagtataaagttgtacgccagtatgggccgttcaacgccatcgtcgaagccacggacaaaacgtggcagctgatgaagctgacggtcagtatgctgggaaaattgatcaccggtgatgtgaaactgaacaacctcagtgggccgatctctatcgccaagggggctgggatgacagcggaactcggggttgtttattacctgccgtttcttgcgcttattagcgtgaacttagggataattaacctgtttccgttgcccgtacttgacggggggcatctgctgttccttgcgatcgaaaagatcaagggcggaccggtatccgagcgggttcaagacttttgttatcgcattggcagcattctgctggtgctgttaatggggcttgcacttttcaatgatttctctcggttatgagagttagttaggaagaacgcataataacgatggcgatgaaaaagttgctcatagcgagcctgctgtttagcagcgccaccgtatacggtgctgaagggttcgtagtgaaagatattcatttcgaaggccttcagcgtgtcgccgttggtgcggccctcctcagtatgccggtgcgcacaggcgacacggttaatgatgaagatatcagtaataccattcgcgctctgtttgctaccggcaactttgaggatgttcgcgtccttcgtgatggtgatacccttctggttcaggtaaaagaacgtccgaccattgccagcattactttctccggtaacaaaagcgtgaaagatgacatgctgaagcaaaacctcgaggcttctggtgtgcgtgtgggcgaatccctcgatcgcaccaccattgccgatatcgagaaaggtctggaagacttctactacagcgtcggtaaatatagcgccagcgtaaaagctgtcgtgaccccgctgccgcgcaaccgtgttgacctaaaactggtgttccaggaaggtgtgagtgctgaaatccagcaaattaacattgttggtaaccatgctttcaccaccgacgaactgatctctcatttccaactgcgtgacgaagtgccgtggtggaacgtggtaggcgatcgtaaataccagaaacagaaactggcgggcgaccttgaaaccctgcgcagctactatctggatcgcggttatgcccgtttcaacatcgactctacccaggtcagtctgacgccagataaaaaaggtatttacgtcacggtgaacatcaccgaaggcgatcagtacaagctttctggcgttgaagtgagcggcaaccttgccgggcactccgctgaaattgagcagctgactaagatcgagccgggtgagctgtataacggcaccaaagtgaccaagatggaagatgacatcaaaaagcttctcggtcgctatggttatgcctatccgcgcgtacagagcatgcccgaaattaacgatgccgacaaaaccgttaaattacgtgtgaacgttgatgcgggtaaccgtttctacgtgcgtaagatccgttttgaaggtaacgataccagcaaagatgccgtcctgcgtcgcgaaatgcgtcagatggaaggtgcatggctggggagcgatctggtcgatcagggtaaggagcgtctgaatcgtctgggcttctttgaaactgtcgataccgatacccaacgtgttccgggtagcccggaccaggttgatgtcgtctacaaggtaaaagagcgcaacaccggtagcttcaactttggtattggttacggtactgaaagtggcgtgagcttccaggctggtgtgcagcaggataactggttaggtacaggttatgctgttggtatcaacgggaccaaaaacgattaccagacctatgctgaactgagcgtaaccaacccgtacttcaccgtagatggcgtaagcctcggtggtcgtctcttctataatgacttccaggcagatgacgccgacctgtccgactataccaacaagagttatggtacagacgtgacgttgggcttcccgattaacgaatataacagcctgcgtgcaggtctgggttatgtacataactccctgtccaacatgcagcctcaggttgcgatgtggcgttatctgtactctatgggtgaacatccgagcacctctgatcaggataacagcttcaaaacggacgacttcacgttcaactatggttggacctataacaagcttgaccgtggttacttcccgacagatggtagtcgtgtcaacctgaccggtaaagtgaccattcctggaagcgataacgaatactacaaagtgacgttagacacggcgacttatgtgccgatcgatgacgatcacaaatgggttgttctggggcgtacccgctggggttatggtgatggtttaggcggcaaagagatgccgttctacgagaacttctatgccggtggttccagcaccgtgcgtggcttccagtccaataccattggtccgaaagcagtttacttcccgcatcaggccagtaattatgatccggactatgattacgaatgtgcgactcaggacggcgcgaaagacctgtgtaaaagcgatgatgctgtaggcggtaacgccatggcggttgccagcctcgagttcatcaccccgacgccgtttattagcgataagtatgctaacagcgttcgtacttccttcttctgggatatgggtaccgtttgggatacaaactgggattccagccaatattctggatatccggactatagtgatccaagcaatatccgtatgtctgcgggtatcgcattacaatggatgtccccattggggccgttggtgttctcctacgcccagccgttcaaaaagtacgatggagacaaggcagaacagttccagtttaacatcggtaaaacctggtaagtgttctccacaaaggaatgtagtggtagtgtagcgatgactttaggcgatcaatataagatcgccgggccacgcaaagaactgcaccctccggtgcaaatgggatggtaaggagtttattgtgaaaaagtggttattagctgcaggtctcggtttagcactggcaacttctgctcaggcggctgacaaaattgcaatcgtcaacatgggcagcctgttccagcaggtagcgcagaaaaccggtgtttctaacacgctggaaaatgagttcaaaggccgtgccagcgaactgcagcgtatggaaaccgatctgcaggctaaaatgaaaaagctgcagtccatgaaagcgggcagcgatcgcactaagctggaaaaagacgtgatggctcagcgccagacttttgctcagaaagcgcaggcttttgagcaggatcgcgcacgtcgttccaacgaagaacgcggcaaactggttactcgtatccagactgctgtgaaatccgttgccaacagccaggatatcgatctggttgttgatgcaaacgccgttgcttacaacagcagcgatgtaaaagacatcactgccgacgtactgaaacaggttaaataagtaatgcctagtattcgactggctgatttagcgcagcagttggatgcagaactacacggtgatggcgatatcgtcatcaccggcgttgcgtccatgcaatctgcacaaacaggtcacattacgttcatggttaacccaaaataccgtgagcatttaggcttgtgccaggcgtccgcggttgtcatgacccaggacgatcttcctttcgcgaaaagtgccgcactggtagtgaagaatccctacctgacttacgcgcgcatggcgcaaattttagataccacgccgcagcccgcgcagaacattgcacccagtgcggtgatcgacgcgacggcgaagctgggtaacaacgtaagcattggcgctaacgcggtgattgagtccggcgttgaactgggcgataacgtgattatcggtgccggttgcttcgtaggtaaaaacagcaaaatcggtgcaggtagccgtctctgggcgaacgtaaccatttaccatgagatccagatcggtcagaattgcctgatccagtccggaacagtggtaggcgcagacggctttggttatgccaacgatcgtggtaactgggtgaagatcccacagattggtcgcgtaattattggcgatcgcgtggagatcggtgcctgcacaaccatcgatcgcggcgcgctggatgacactattattggcaatggcgtgatcattgataaccagtgccagattgcacataacgtcgtgattggcgacaatacggcggttgccggtggcgtcattatggcgggcagcctgaaaattggtcgttactgcatgatcggcggagccagcgtaatcaacgggcatatggaaatatgcgacaaagtgacggttacgggcatgggtatggtgatgcgtcccatcactgaaccaggcgtctattccagtggcattccgctgcaacccaacaaagtctggcgcaaaaccgctgcactggtgatgaacattgatgacatgagcaagcgtctgaaaagccttgagcgcaaggttaatcaacaagactaacgttccatcttttgttcgccaaactttacggcctgtctcattcttacgattgcggcaggccgtgttattattgtcgtttcttatattttgacaggaagagtatcttgactactaacactcatactctgcagattgaagagattttagaacttctgccgcaccgtttcccgttcttactggtggatcgcgtgctggattttgaagaaggtcgttttctgcgcgcagtaaaaaatgtctctgtcaatgagccattcttccagggccatttccctggaaaaccgattttcccgggtgtgctgattctggaagcaatggcacaggcaacaggtattctggcgtttaaaagcgtaggaaaactggaaccgggtgagctgtactacttcgctggtattgacgaagcgcgcttcaagcgcccggtcgtgcctggcgatcaaatgatcatggaagtcactttcgaaaaaacgcgccgcggcctgacccgttttaaaggggttgctctggtcgatggtaaagtagtttgcgaagcaacgatgatgtgtgctcgtagccgggaggcctgatacgtgattgataaatccgcctttgtgcatccaaccgccattgtggaagagggcgcgagtattggcgcgaacgcacacattggtcctttttgtatcgttggaccccatgtcgaaattggtgagggtaccgtactgaaatctcacgttgtcgtgaatggtcatactaaaattggccgcgataatgagatttatcagttcgcctccatcggcgaagttaaccaggatctgaaatatgctggcgaaccgacccgtgtggaaatcggcgatcgtaaccgcattcgcgaaagcgtcaccattcatcgtggcacagtccagggcggtggattgacgaaggtgggcagcgacaacttactgatgatcaacgcgcacattgcgcacgattgtacggtaggtaaccgctgtattctcgccaacaacgcaacgctggcgggtcacgtaagcgttgacgacttcgcgatcatcggcggcatgaccgcagtccatcagttctgcatcattggtgcgcacgtgatggttggcggctgctccggtgtggcgcaggacgtccctccttatgtcattgcgcagggtaaccacgcaacgccgttcggtgtcaatatcgaagggctgaagcgccgcggattcagccgtgaggcgattaccgctatccgcaatgcgtataagctgatttatcgtagcggtaaaacgctcgatgaagtgaaaccggaaattgctgaactggcggaaacatatccggaagtgaaagcctttaccgatttctttgcacgcagtacgcgcggtctgattcgttaatgactgaacagcgtccattaacgattgccctggtcgccggagaaacctccggcgatatcctgggggccggtttaatccgcgctctgaaagaacatgtgcccaacgcccgctttgttggtgttgccgggccacgaatgcaggctgaaggctgcgaagcctggtacgaaatggaagaactggcggtgatgggcattgttgaagtgctcggtcgtctgcgtcgcttactgcatattcgtgccgatctgacaaagcgttttggcgaactgaagccagatgtttttgttggtattgatgcgcctgacttcaatattactcttgaaggtaacctcaaaaagcagggtatcaaaaccattcattacgtcagtccgagtgtctgggcgtggcgacagaaacgtgttttcaaaataggcagagccaccgatctggtgctcgcatttctgcctttcgaaaaagcgttttatgacaaatacaacgtaccgtgccgctttatcggtcataccatggctgatgccatgccattagatccagataaaaatgccgcccgtgatgtgctggggatccctcacgatgcccactgcctggcgttgctaccggggagccgtggtgcagaagttgaaatgcttagtgccgatttcctgaaaacggcccagcttttgcgccagacatatccggatctcgaaatcgtggtgccactggtgaatgccaaacgccgcgagcagtttgaacgcatcaaagctgaagtcgcgccagaccttagtgttcatttgctggatgggatgggccgtgaggcgatggtcgccagcgatgcggcgctactggcgagcggtacggcagccctggagtgtatgctggcgaaatgcccgatggtggtgggatatcgcatgaagccttttaccttctggttggcgaagcggctggtgaaaactgattatgtcagcctgccaaatctgctggcgggcagagagttagtcaaagaattattgcaggaagagtgtgagccgcaaaaactggctgcggcgctgttaccgctgttggcgaacgggaaaaccagccacgcgatgcacgataccttccgtgaactgcatcagcagatccgctgcaatgccgatgagcaggcggcacaagccgttctggagttagcacaatgatcgaatttgtttatccgcacacgcagctggttgcgggtgtggatgaagtcggacgcgggccgttagttggcgcggtcgtcaccgctgcggtgatccttgacccggcgcgcccgattgccgggctgaatgattccaaaaagctgagcgaaaaacgccgtctggcgctctatgaagagatcaaagagaaagcgttgagctggagtctgggccgcgcggaaccccacgaaatcgacgagctgaacattcttcatgcgaccatgctggcgatgcagcgtgccgtcgctgggctgcatattgcgccggaatatgtgttgattgatggtaaccgctgcccgaaattaccgatgcctgcgatggctgtggtgaaaggcgatagccgcgtaccggaaatcagtgccgcgtctatcctggcgaaagtgacgcgtgacgccgaaatggcggcgctggatattgttttcccgcaatatggttttgcccaacacaaagggtacccaaccgcttttcatctggaaaaactggctgaacacggcgcgaccgaacaccatcggcgcagctttgggcctgtcaaacgcgcactgggacttgcgtcctgattcttgtgtcgagattaagtaaaccggaatctgaagatgtctgaaccacgtttcgtacacctgcgggtgcacagcgactacagcatgatcgatggcctggccaaaaccgcaccgttggtaaaaaaggcggcggcgttgggtatgccagcactggcgatcaccgatttcaccaacctttgtggtctggtgaagttctacggagcgggacatggcgcagggattaagcctatcgtcggggcagattttaacgtccagtgcgacctgctgggtgatgagttaacccacctgacggtactggcggcgaacaataccggctatcagaatctgacgttgctgatcagtaaagcgtatcagcgcgggtacggtgccgccgggccgatcatcgatcgcgactggcttatcgaattaaacgaagggttgatccttctttccggcggacgcatgggcgacgtcggacgcagtcttttgcgtggtaacagcgcgctggtagatgagtgtgtcgcgttttatgaagaacacttcccggatcgctattttctcgagctgatccgcaccggcaggccggatgaagaaagctatctgcacgcggcggtggaactggcggaagcgcgcggtttgcccgtcgtggcgaccaacgacgtgcgctttatcgacagcagcgactttgacgcacacgaaatccgcgtcgcgatccacgacggctttaccctcgacgatcctaaacgcccgcgtaactatagcccgcagcaatatatgcgtagcgaagaggagatgtgtgagctgtttgccgacatccccgaagcccttgccaacaccgttgagatcgccaaacgctgtaacgtaaccgtgcgtcttggtgaatacttcctgccgcagttcccgaccggggacatgagcaccgaagattatctggtcaagcgtgcaaaagagggcctggaagagcgtctggcctttttattccctgatgaggaagaacgtcttaagcgccgcccggaatatgacgaacgtctggagactgaacttcaggttatcaaccagatgggcttcccgggctacttcctcatcgttatggaatttatccagtggagcaaagataacggcgtaccggtagggccaggccgtggctccggtgcgggtagtctggtggcctacgcgctgaaaatcaccgacctcgatccgctggaatttgacctgctgttcgaacgtttccttaacccggaacgtgtctccatgcctgacttcgacgttgacttctgtatggagaaacgcgatcaggttatcgagcacgtagcggacatgtacggtcgtgatgcggtaagccagatcatcaccttcggtacaatggcggcgaaagcggtgatccgcgacgtaggccgcgtgctggggcatccgtacggctttgtcgatcgtatcagcaaactgatcccgcccgatccggggatgacgctggcgaaagcgtttgaagccgagccgcagctgccggaaatctacgaagcggatgaagaagttaaggcgctgatcgacatggcgcgcaaactggaaggggtcacccgtaacgccggtaagcacgccggtggggtggttatcgcgccgaccaaaattaccgattttgcgccgctttactgcgatgaagagggcaaacatccggtcacccagtttgataaaagcgacgttgaatacgccggactggtgaagttcgacttccttggtttgcgtacgctcaccatcatcaactgggcgctggagatgatcaacaagcggcgggcgaagaatggcgagccgccgctggatatcgctgcgatcccgctggatgataagaaaagcttcgacatgctgcaacgcagcgaaaccacggcggtattccagcttgaaagccgcggcatgaaggacctgatcaagcgtctacaacctgactgcttcgaagatatgatcgccctagtggcactgttccgccccggtccgttgcaaagtgggatggtggataactttatcgaccgtaaacatggtcgtgaagagatctcctatccggacgtacagtggcagcatgaaagcctgaaaccggtactggagccaacctacggcattatcctgtatcaggaacaggtcatgcagattgcgcaggtgctttctggttataccctcggtggcgcggatatgctgcgtcgtgcgatgggtaagaaaaagccggaagagatggctaagcaacgttctgtatttgctgaaggtgcagaaaagaacggaatcaacgctgaactggcgatgaaaatcttcgacctggtggagaaattcgctggttacggatttaacaaaagccactctgcggcctatgctttggtgagttatcaagcgttatggctgaaagcgcactatcctgcggagtttatggcggcggtaatgaccgccgatatggacaacaccgagaaggtggtgggtctggtggatgagtgctggcggatggggctgaaaatcctgccaccagatataaactccggtctttaccatttccacgtcaacgacgacggcgaaatcgtgtatggtattggcgcgatcaaaggggtcggtgaaggtccgattgaggccatcatcgaagcccgtaataaaggcggctacttccgcgaactgtttgatctctgcgcccgtaccgacaccaaaaagttgaaccgtcgcgtgctggaaaaactgatcatgtccggggcgtttgaccgtcttgggccacatcgcgcagcgctgatgaacagcctgggcgatgcgttaaaagcggcagatcaacacgcgaaagcggaagctatcggtcaggccgatatgttcggcgtgctggccgaagagccggaacaaattgaacaatcctacgccagctgccaaccgtggccggagcaggtggtattagatggggaacgtgaaacgttaggcctgtacctgaccggacaccctatcaaccagtatttaaaagagattgagcgttatgtcggaggcgtaaggctgaaagacatgcacccgacagaacgtggtaaagtcatcacggctgcggggctcgttgttgccgcgcgggttatggtcaccaagcgcggcaatcgtatcggtatctgcacgctggatgaccgttccgggcggctggaagtgatgttgtttactgacgccctggataaataccagcaattgctggaaaaagaccgcatacttatcgtcagcggacaggtcagctttgatgacttcagcggtgggcttaaaatgaccgctcgcgaagtgatggatattgacgaagcccgggaaaaatatgctcgcgggcttgctatcagcctgacggacaggcaaattgatgaccagcttttaaaccgactccgtcagtctctggaaccccaccgctctgggacaattccagtacatctctactatcagagggcggatgcacgcgcgcggttgcgttttggcgcgacgtggcgtgtctctccgagcgatcgtttattaaacgatctccgtggcctcattggtagcgagcaggtggaactggagtttgactaatacaggaatactatgagtctgaatttccttgattttgaacagccgattgcagagctggaagcgaaaatcgattctctgactgcggttagccgtcaggatgagaaactggatattaacatcgatgaagaagtgcatcgtctgcgtgaaaaaagcgtagaactgacacgtaaaatcttcgccgatctcggtgcatggcagattgcgcaactggcacgccatccacagcgtccttataccctggattacgttcgcctggcatttgatgaatttgacgaactggctggcgaccgcgcgtatgcagacgataaagctatcgtcggtggtatcgcccgtctcgatggtcgtccggtgatgatcattggtcatcaaaaaggtcgtgaaaccaaagaaaaaattcgccgtaactttggtatgccagcgccagaaggttaccgcaaagcactgcgtctgatgcaaatggctgaacgctttaagatgcctatcatcacctttatcgacaccccgggggcttatcctggcgtgggcgcagaagagcgtggtcagtctgaagccattgcacgcaacctgcgtgaaatgtctcgcctcggcgtaccggtagtttgtacggttatcggtgaaggtggttctggcggtgcgctggcgattggcgtgggcgataaagtgaatatgctgcaatacagcacctattccgttatcagcccggaaggttgtgcgtccattctgtggaagagcgccgacaaagcgccgctggcggctgaagcgatgggtatcattgctccgcgtctgaaagaactgaaactgatcgactccatcatcccggaaccactgggtggtgctcaccgtaacccggaagcgatggcggcaagcttgaaagcgcaactgctggcggatctggccgatctcgacgtgttaagcactgaagatttaaaaaatcgtcgttatcagcgcctgatgagctacggttacgcgtaattcgcaaaagttctgaaaaagggtcacttcggtggcccttttttatcgccacggtttgagcaggctatgattaaggaaggattttccaggaggaacacatgaacatcattgccattatgggaccgcatggcgtcttttataaagatgagcccatcaaagaactggagagcgcgctggtggcgcaaggctttcagattatctggccacaaaacagcgttgatttgctgaaatttatcgagcataaccctcgaatttgcggcgtgatttttgactgggatgagtacagtctcgatttatgtagcgatatcaatcagcttaatgaatatctcccgctttatgccttcatcaacacccacagcacgatggatgtcagcgtgcaggatatgcggatggcgctctggttttttgaatatgcgctggggcaggcggaagatatcgccattcgtatgcgtcagtacaccgacgaatatcttgataacattacaccgccgttcacgaaagccttgtttacctacgtcaaagagcggaagtacaccttttgtacgccggggcatatgggcggcaccgcatatcaaaaaagcccggttggctgtctgttttatgatttttcggcgggaatactcttaaggctgatgtctctattagcgtcaccgagcttggtagcttgctcgaccacaccgggccacacctggaagcggaagagtacatcgcgcggacttttggcgcggaacagagttatatcgttaccaacggaacaagcacgagcaacaaaattgtgggtatgtacgccgcgccatccggcagtacgctgttgatcgaccgcaattgtcataaaagcctggcgcatctgttgatgatgaacgatgtagtgccagtctggctgaaaccgacgcgtaatgcgttggggattcttggtgggatcccgcgccgtgaatttactcgcgacagcatcgaagagaaagtcgctgctaccacgcaagcacaatggccggttcatgcggtgatcaccaactccacctatgatggcttgctctacaacaccgactggatcaaacagacgctggatgtcccgagcattcacttcgattctgcctgggtgccgtacacccattttcatccgatctaccagggtaaaagtggtatgagcggcgagcgtgttgcgggaaaagtgatcttcgaaacgcaaagcacccacaaaatgctggcggcgttaagccaggctagcctgatccacattaaaggcgagtatgacgaagaggcctttaacgaagcctttatgatgcataccaccaccagccccagttatcccattgttgctagcgttgagacggcggcggcgatgctgcgtggtaatccgggcaaacggctgattaaccgtagtgtagaacgagctctgcattttcgcaaagaggtccagcggctgcgggaagagtctgacggttggtttttcgatatctggcaaccgccgcaggtggatgaagccgaatgctggcccgttgcgcctggcgaacagtggcacggctttaacgatgcggatgccgatcatatgtttctcgatccggttaaagtcactattttgacaccggggatggacgagcagggcaatatgagcgaggaggggatcccggcggcgctggtagcaaaattcctcgacgaacgtgggatcgtagtagagaaaaccggcccttataacctgctgtttctctttagtattggcatcgataaaaccaaagcaatgggattattgcgtgggttgacggaattcaaacgctcttacgatctcaacctgcggatcaaaaatatgctacccgatctctatgcagaagatcccgatttctaccgcaatatgcgtattcaggatctggcacaagggatccataagctgattcgtaaacacgatcttcccggtttgatgttgcgggcattcgatactttgccggagatgatcatgacgccacatcaggcatggcaacgacaaattaaaggcgaagtagaaaccattgcgctggaacaactggtcggtagagtaagcgcaaatatgatcctgccttatccaccgggcgtaccgctgttgatgcctggagaaatgctgaccaaagagagccgcacagtactcgattttctactgatgctttgttccgtcgggcaacattaccccggttttgaaacggatattcacggcgcgaaacaggacgaagacggcgtttaccgcgtacgagtcctaaaaatggcgggataacttgccagagcggcttccgggcgagtaacgtgctgttaacaaataaaggagacgttatgctgggtttaaaacaggttcaccatattgcgattattgcgacggattatgcggtgagcaaagctttctactgcgatattcttggtttcacgctgcaaagcgaagtctatcgcgaagcgcgcgacagttggaaaggggatttggcgcttaatgggcaatatgtgattgagcttttcagttttccgttcccgccggaacgacccagccgaccggaagcttgcggtctgcgtcatctggcttttagcgttgatgacatcgatgcggcagtggcgcaccttgaaagccataacgtgaagtgtgaaaccatccgtgtcgatccatacacgcaaaaacgcttcaccttctttaacgatccggacgggctgccgttggaactgtatgagcagtaaggcttgtcatcgccgcatttgcccggtaacgtgccgggcattgctactgtaaaatcgcaccatcatgacactcacgctcaatagacaacttctcaccagtcgccagattctggtggcctttagcggcgggcttgactccaccgttctgctgcatcagttggtgcagtggcggacggaaaatccgggtgtcgctctgcgcgctattcatgtgcatcacggtttaagtgccaatgccgatgcctgggttacgcattgcgaaaacgtctgccaacagtggcaggtgccgctggtggtcgaacgcgtacaacttgcgcaagaaggactgggcattgaggcccaggcgcggcaggcacgttatcaggcatttgcccgcaccttgttgcccggtgaagtgctggtcaccgcgcaacatctcgacgatcaatgtgaaacctttctgctggcgctaaaacgcggcagtggccctgccgggcttagcgctatggcggaagtcagcgagtttgccggaacgcggcttattcgcccgttgctcgcccgcacgcggggggaactggtgcagtgggcgcgtcagtatgatttacgctggattgaagacgaaagtaatcaggacgacagttacgatcgtaactttctgcgcctgcgcgtagtgccgttattgcagcagcgttggccgcattttgccgaagcaacggcccgcagcgccgcactttgtgctgaacaagagagcctgctggatgaactgctggcagatgatttagcacactgtcaaagcccgcaggggacgctgcagattgtgccaatgctggcgatgagtgatgcccgccgcgcggcgattatccgccgctggctggcagggcagaatgcaccgatgccttcccgcgacgcgttggtgaggatctggcaggaagtggcgctggcgcgggaagatgccagtccctgtttacgtttgggcgcgtttgaaatccgacgctatcagagccaactgtggtggattaaatccgtcaccgggcaaagcgaaaacattgtgccgtggcagacgtggcttcaaccgctggaattaccggcggggctgggaagtgtacagcttaatgcgggaggcgatattcgccctccgcgtgcagacgaagcggtcagcgtgcgtttcaaagcgccaggattgctgcatattgtcgggcgtaacggcggacgtaagctaaagaaaatctggcaagagctgggcgtgccgccgtggctacgtgacaccacgccactgctgttttatggcgaaacgctgattgcggcggcaggggtatttgtgacgcaagaaggtgtggctgaaggtgagaatggcgtaagttttgtctggcagaaaacgcttagttaagtgaaagccggataagacgcatcaaacgtcgcatccggcgaaagtcaatcaggattcgcttaccaccaccgtaccgatttccgggtggctaaagctggtaattttatccagacgcagctcgcgggtttcgccagcggcctcgacgaccaggtactccacatttttgcgggagactaaatcactggcttttgcctgcaatttttcgccatctttcagctcaagtgtcagcattaaatgatgctggcaggcgagctcaagattatcgtaatcatcacaattgattggttgatacgtatcattcattgacataatcgctcaccagtaagtttgccgcagcgtatgctgctttttccctgacagcctcagaaagggcgtcgtcggcagccatttcattcagcactttcaaaacgcagcccagcgcgtccggaacgtatcctaagtctccgctggcgatttccgcgtaccgcttgcgtattaactcacaatatttttccacatgccctcctgtcagcactctgacttaaccgtggatgcaagtctaagcctacgaagataaactctgtttcgcaaggtgactataccacactcatttctgcaatatcagcgccgcaactgcacgtattccgttacaatggcctcctgattcgaaaggagttttcttatggcgcttaaagcgacaatttataaagcgacggttaatgtggccgatctcgaccgcaaccagtttctcgatgcctctctgacgctggcgcgccatcctagtgaaacccaggagcgtatgatgctgcgcttgctggcgtggctgaaatatgctgatgaacgtctgcaatttacccgtggtttgtgtgccgatgatgagccggaagcgtggctgcgtaacgatcacctgggcattgatttgtggattgagctggggctgccggatgagcggcggattaagaaagcctgcacccaggccgcagaagtggcgctgtttacctataatagtcgggcggcgcaaatctggtggcagcaaaatcagagcaaatgtgtgcagtttgccaatctttccgtctggtatctggacgatgaacaactggcgaaagtaagcgcctttgccgatcgtaccatgacgctgcaggcaacgattcaggatggcgtgatctggttaagcgatgataagaataatctggaagtgaacttaaccgcctggcaacaacctagttgaactaaaccgcctggcaacaaccttcatgattgtgatttcccgacatgttgctattcccgatggtgagcttgagatcaccgccattcgtgcgcagggcgcgggcgggcagcatgttaataagaccagtacggctattcatctgcgttttgacattcgggcgtccagcctgccagagtattacaaagagcgtctgctcgccgccagccatcatttgatcagcagtgatggcgtgattgtcattaaggcacaggaataccgcagtcaggaactgaaccgcgaagcagctctggcccggctggtggctatgattaaagaattaacaacagaaaaaaaagcccgacgacccacgcggcccacccgtgcaagcaaagagcgcaggctggcaagcaaagcacaaaaaagtagcgtgaaggcgatgcgcggcaaagtgcgcagcggtcgggaataaaaagaaggaatggatggtgaaaaaagcgatagtgacagcgatggctgtaatcagcctctttactctgatgggatgtaataatcgggccgaagtcgatacgctttctccggcgcaggctgccgaactgaaaccgatgccgcaaagttggcgcggcgtgctgccgtgtgccgattgcgaaggaatcgaaacctctctgttcctcgaaaaagacggaacatgggtgatgaatgagcgttatctcggtgctcgtgaagaaccttcctccttcgcttcctacggtacatgggcgcgaaccgctgacaagctggtattaaccgacagcaaaggtgaaaagagttattatcgggcgaaaggcgatgcgctggagatgctcgatcgtgaaggcaatccgattgaaagccagttcaactatacgctggaagcggcacaatccagtttacctatgacgccgatgaccctgcggggcatgtatttttatatggctgatgcggcgaccttcactgattgcgcgaccggaaaacgtttcatggtagcgaataacgcagagctggagcgtagctacctggctgcgcgcggtcacagtgaaaaaccggtgttactgagtgtagaaggtcactttacgcttgagggtaatccggataccggtgcgccgactaaagtattggcacccgatacggcagggaaattttaccccaaccaggattgcagtagtttggggcagtaacccgtcttgagacagaaacaaacgcaaaacaggccagaaggatatatttcaacattttgaatttgcacgttttttgtaggccggataaggcgtttacgccgcatccggcaatggtgctcaacgcctgatgcgacgctggcgcgtcttatcatgcctacaacccccctcataccttaaggcggataaggcatttactttatcaccgggtcaaaccaacaaagcgacccgccttgatataaatcccaggcttcaggtgcccaacatactgtaactgcgtttctggcttaaacgcagagacatcaccaatacgcatatgcatcagatcggcagggctaatccagccgctttgcgccagtgtaagtggatgcccggctttggcaaaggcatccgtgacaaattcgctacaaaaccagctctttttgtctccttcgcccacactgcttaactgcgctttcgccaggccgctgacgcactgttggcgaaaatcctcggagaacggattcagactgcacatctggcgagtcaccataaagggaataaattcgacaatgccgcgatagttataaccgctatctttgattttattggcaaacgcggtgatatctgtggcttgttgcggggtaagatccgggactcgtaagacgaaaagcttatcactatgcttcatcgcttttttaagggaaacgatctggacgccagcgcctgtcgcttctgcaacgttattatcacccagaaagattgcaacgtgactcacagaggaagtgctgaagacgcggattccaaaactggttaccccaaggctactggagaacagcaaatcgccgggtttgagatcaggtgccgttatttcttttatactttgttcggtgaaagagctttgatgctggaatttgacagcccatgtttttgcctcggcatctactgctgtggcacttgggtctggctggctgatatcaacggtacaagcgctaagtaaaagaaagctggggagaaacaggcggcagtacgcctttggtttatccattttatacaatccatgtaaaaaaagggccctgaaattcaggaccctttctggcatcagcctttaatctgtttcaccagatattcgacgatgtcaccagtcttaattaactgtttctcgccgttgcgacgatatttatattcgatatcgtcgttgtcgaggttacggtcgcccagcacaatagtgtgcggaataccgatcagttccatatcagcaaacatcacgcccggacgctctttgcggtcatccagcagcacttcgataccttgtgcacgcagttcgctgtacagtttctcagcaagctcttgtacgcggaaggatttgtgcatgttcatcggcagaatcgccacctggaacggcgcgatagcgtcaggccatacgatgcctcgttcgtcgtagttctgctcaatcgccgcagctaccacacgcgttaccccgataccgtagcaacccatcgtcaggatttggttacggccatcttcaccctgtacggaggctttcagtgcttcggagtacttggtacccagctggaagatgtgaccaacttcgataccacgtttgatcagcagcctaccctggccatccgggcttggatcgccagccaccacgttacggatatctgcaacttccggggtagcgacatcgcgatcccagttgatgccgaagtagtgtttaccatcgatgttagcaccagcagcgaaatcactcatcgccgcaacggtacggtcaatcaccaccggaatcggcatgtttaccggacccagactacccggaccggctttaaccacggcacgaatttcttcttcggtcgcgaaagtcagcgggcttgcaacctgcggcagtttttctgctttaacttcgttcagctcgtgatcaccgcgcaccagcagcgcaacctgcgggaagctgctgccttcaaccgctttaaccagcagagtcttaaccgttttctcaatcggcagattgaactgttcaaccagttccgcgatggttttcgcgttcggcgtatcaaccagcgtcatttcctgggtagcagcagcgcgcggttctttcggcgcgatagcttctgccagttcaatgttcgctgcatagtcagaggtgtcggagaagaccacatcgtcttcaccgctctgcgccagcacctggaattcgtgagaggcgctgccgccgatagaaccggtgtcggcttgtacggcgcggaaatccagccccatgcggctgaagattttgctgtaggccgcatacattgcatcgtaggtttcctgcagggattcctgagaagtatggaaagagtaagcatctttcatcaggaattcgcgggaacgcatgacgccgaaacgcggacgcacttcgtcgcggaacttggtctggatctgatagaagttcagcggcagctgtttgtaagagctaagctcgttacgaatcaggtcagtgataacttcttcatgagttgggccgagtacgaacggacgctcgccacggtcaacaaaacgcagcagttccggaccgtactgttcccaacgaccactctcttgccacaaatcggctggctgaaccaccggcatgctcacctcgatcgcaccggcgttgttcatctcttcacgcacgatgttttcgacttttttcagaacgcgcacgccggtcggcagccaggtatataacccggaggccagcttgcggatcatcccggcgcgcagcatcagctgatggctgatcacctcggcgtcggcaggtgtctccttgagagtggagagcaggtattggctagtacgcatgttgttacggttccagttggaaggtagaacaggctcaaggcgagcctgggacaaaaaaagtgatttagtttaccagtgcaaaagaaatgtcaaaagagaagggcgtgaatttaacgcggttccagcgcaaagacttcaaaacctgcgtcggtgacgcgccagcgaacgttaaaatcatgtagccagacggcataggttttgcccgtttcctcacctttacgataggccgggcgcgggtcctgcgccagtacttcgcggataaacagcgttaactgcggataacgcttctccagcgtcaaaagctgcttttcgacctctgcggtaaaactcaccgccatctctgcagctggcgcactttgcgcatagctggcactggcatcgggaaggctttcggcaaaggggagatacggtttgatatccactaccggcgtaccatcgaccagatccagactgccgagcttcagaatcacgctgtctttatggcaaacaacctctttcagctctaccaggctcatgccaattgggttagggcggaaagtagagcgtgttgcgaaaacccccattctggcgttaccgccgaggcgcggtggacgcacagtcggacgccagccgccttccatcgtttgatgaaagacgaaaaggatccataaatggctgaacgcttccaggccgcgaacggcgtcggcctggttgtagggagcaatgagatgcagttcgccgttggcgctttttaccagacctggctggcgcggaacggcgaacttttctttataggggctgcgaataacgcctatttgctcgaactggaaactgctcatttcgccgtaatgttaagcgcagaaccgatacatacagcctgacgatagcagcctggcgtaccgctggtgacttcgcagctatgcagtaatacagcattggctttcattttagaggcgttgatttgcatccgcttacgtgcggttggaatgctcggcggagagtcctgattagaggcctggcaagagtcgccactgacttcaccgagatcgcggaacggtttgccgactaattcttctgcattggtataaattcggaccggcgtggcgcgcggcgctttcggttttgcaggctccgctttcggctggggtgcagtgctttgaacgggttcgacaggggatctgcttaacatggaacagccgcttagcatgagtgctactaaacagatcggtaaagcacgcatagtatttcctcaatgtatgatcaaaacgtcaatattgaatcaggagcttgtaaaaatgacaagacgggcaagcgcccgtcctgaatgatattacaaattgtggaaacagcctaaaaattaccagcctttaacagctccgccgttaaacactttgtttgctgcttcgtaaacttcgtcagactgataagcctggacgaatttcttcacgttctcggcgtctttgttatcttcacgcgtcacgatcaggtttacgtacggggactctttatcttcaacaaagataccgtctttcgccggagtcaggccaatctggctggcataggtggtattgataactgccagagcgatttgcgcgtcgtccagagaacgcggcagttgcggtgcttccagttcaacaattttcagatttttggggttctcaacaacatcaagaacggtcggcagcaggccaacgccatctttcagtttgatcaagcccactttttgcagcagcagcagactacgaccaaggttagttgggtcgtttggcacggcaacctggctaccatcctgcagttcatccagacttttgattttcttggagtaaccagcaatcggataaacaaaagtgttgcctactgcgaccagtttgtagccacgatctttcagttgctgatcaaggtacggtttatgctggaaggcgttggcgtcgatatcgcctttgctcaatgcttcgtttggcagaacatagtcgttgaaggttaccagctcaacgtccaggccatatttgtctttcgcaactttctgcgcgacttctgcaacctgctgttcggcaccaacaatcacgccgactttaatgtggtttggatctttttcatcctgaccgcagcctaccagtgccagacttccgatcagggctcccactgccgcaaaggttttgaatttgaacgccataccttattccttcttcaattatttatgttgtgttgaacgttacttgcgagtgacagcccggacgatgcggtcgcctgcgaactgaattaaataaaccagaatgaccagcaataccagtaccgtattcatcaccgtcgcgttatagccgatgtagccatactgatagccaatctgacctaaaccaccggcaccgactgcaccacccatcgcggaataaccgaccagggtaatcagggtgatagttgccgcattcaccagacccggcagcgcttccggtaacagcaccttacggacgatctgcatcggcgtggcacccattgcgcgggaagcttcaattaacccggttgggatctccagcagagcgttctcgaccatacgggcaataaacggtgctgcaccaacggttaacggaacaatcgctgcctgcaaaccaatgcttgtaccgacaataacgcgggtaaacggaatcatccatacaagcaagataatgaacgggatggaacggaaaatgttcacaatcgcagaaacggtacgatacagcttcgcgttagcaataatttgccccggacgcgtgacataaagcagaacgccaaccggcagaccaatcacaaagccaaaaaaaccggatacgaaggtcattgccagcgtttcccatacgccacgaaccagcagccacatcatcggctcagacataacccagtacctctacttttacatggtgttcctgcagccaggcaatggcggcttgcgtatcttgttgtgtgccgtgcatttcagtcagcatgatgccgaacttaacgccaccggcgtaatccatctgcgcgctaataatgttgttgttgacgttgaaacgacgcgcggtttcagaaagcagtggggcatcgacgctttgaccggtaaactccagacgcagcatcggcacgcagtcagtaaatggctccgcttgcagacgttcctggtaatcttccgggatatccagatgcagggtgctctgaataaacttctgcgccagcggcgttttcggatggctgaacacttcacttaccgtgtcctgctcgatcagttctccattgctgatgaccgccacgcaatcacaaatgcgcttcacaacgtccatttcgtgggtgatcaacagaatcgtcaaccccagacggcggttgatgtctttcagcagttcgagaatagaacgtgtcgttgccgggtccagcgcgctggtggcttcatcacacagcaatactttgggattgctggctaacgcacgggcaattgccacacgttgtttctgcccaccggaaagattgctcgggtagctatcatgcttatcgccaagaccaaccaaactcagcaattccgtcacgcgacgtttgacctcgtctttcggtgtgttgtccagctccagcggcagagccacgttgccaaaaacagtacggctagagagcaggttaaaatgctggaaaatcataccaatctggcggcgagctttggtcaactcggattcactcagcgtggtcagttcctggccatcgaccagcacgctaccctcggttgggcgctccagcaggtttacacaacgtataagcgtactcttacccgcgccactggcaccgataacgccataaatttgtccagctggcacatgcaggctgacgttgttcaacgcctggatggtgcgggtgccctggtggaacactttggtgatattgctaagttttatcattgattatttattatcgtcattaagttagtcgtggcatctcgaatgcctgaaacgggcaacgccgtcaatgaaatggatgttaaggcatccagacgtctaaatcaatcaggtttatgcgaagagcactttcttgcaggtcgaaacatgcgatactagcgtcacatgccttattaaggagctataaaaggtggcgaagagcgtacccgcaatttttcttgaccgtgatggcaccattaatgtcgatcacggctatgtccatgagatcgacaactttgaatttatcgacggtgttattgacgccatgcgcgagctaaaaaaaatgggctttgcgctggtggtagtaaccaaccagtctggcattgctcgcggtaaatttaccgaagcacagtttgaaacgctgaccgagtggatggactggagcctggcggaccgagatgtcgatctggatggtatctattattgcccgcatcatccgcagggtagtgttgaagagtttcgccaggtctgcgattgccgcaaaccacatccggggatgcttttgagtgcacgcgattatttgcatattgatatggccgcttcttatatggtgggcgataaattagaagatatgcaggcagcggttgcggcgaacgtgggaacaaaagtgctggtgcgtacgggtaaacctattacgcctgaagcagaaaacgcggcggattgggtgttaaatagcctggcagacctgccgcaagcgataaaaaagcagcaaaaaccggcacaatgattaaaagatgagcggttgaaataaaaatgcatttttccgcttgtcttcctgagccgactccctataatgcgcctccatcgacacggcggatgtgaatcacttcacacaaacagccggttcggttgaagagaaaaatcctgaaattcagggttgactctgaaagaggaaagcgtaatatacgccacctcgcgacagtgagctgaaagccgcgtcgcaactgctctttaacaatttatcagacaatctgtgtgggcactcgaagatacggattcttaacgtcgcaagacgaaaaatgaataccaagtctcaagagtgaacacgtaattcattacaaagtttaattctttgagcatcaaacttttaaattgaagagtttgatcatggctcagattgaacgctggcggcaggcctaacacatgcaagtcgaacggtaacaggaagaagcttgcttctttgctgacgagtggcggacgggtgagtaatgtctgggaaactgcctgatggagggggataactactggaaacggtagctaataccgcataacgtcgcaagaccaaagagggggaccttcgggcctcttgccatcggatgtgcccagatgggattagctagtaggtggggtaacggctcacctaggcgacgatccctagctggtctgagaggatgaccagccacactggaactgagacacggtccagactcctacgggaggcagcagtggggaatattgcacaatgggcgcaagcctgatgcagccatgccgcgtgtatgaagaaggccttcgggttgtaaagtactttcagcggggaggaagggagtaaagttaatacctttgctcattgacgttacccgcagaagaagcaccggctaactccgtgccagcagccgcggtaatacggagggtgcaagcgttaatcggaattactgggcgtaaagcgcacgcaggcggtttgttaagtcagatgtgaaatccccgggctcaacctgggaactgcatctgatactggcaagcttgagtctcgtagaggggggtagaattccaggtgtagcggtgaaatgcgtagagatctggaggaataccggtggcgaaggcggccccctggacgaagactgacgctcaggtgcgaaagcgtggggagcaaacaggattagataccctggtagtccacgccgtaaacgatgtcgacttggaggttgtgcccttgaggcgtggcttccggagctaacgcgttaagtcgaccgcctggggagtacggccgcaaggttaaaactcaaatgaattgacgggggcccgcacaagcggtggagcatgtggtttaattcgatgcaacgcgaagaaccttacctggtcttgacatccacagaactttccagagatggattggtgccttcgggaactgtgagacaggtgctgcatggctgtcgtcagctcgtgttgtgaaatgttgggttaagtcccgcaacgagcgcaacccttatcttttgttgccagcggtccggccgggaactcaaaggagactgccagtgataaactggaggaaggtggggatgacgtcaagtcatcatggcccttacgaccagggctacacacgtgctacaatggcgcatacaaagagaagcgacctcgcgagagcaagcggacctcataaagtgcgtcgtagtccggattggagtctgcaactcgactccatgaagtcggaatcgctagtaatcgtggatcagaatgccacggtgaatacgttcccgggccttgtacacaccgcccgtcacaccatgggagtgggttgcaaaagaagtaggtagcttaaccttcgggagggcgcttaccactttgtgattcatgactggggtgaagtcgtaacaaggtaaccgtaggggaacctgcggttggatcacctccttaccttaaagaagcgtactttgcagtgctcacacagattgtctgatgaaaatgagcagtaaaacctctacaggcttgtagctcaggtggttagagcgcacccctgataagggtgaggtcggtggttcaagtccactcaggcctaccaaatttgcacggcaaatttgaagaggttttaactacatgttatggggctatagctcagctgggagagcgcctgctttgcacgcaggaggtctgcggttcgatcccgcatagctccaccatctctgtagtggttaaataaaaaatacttcagagtgtacctgcaaaggttcactgcgaagttttgctctttaaaaatctggatcaagctgaaaattgaaacactgaacaatgaaagttgttcgtgagtctctcaaattttcgcaacacgatgatggatcgcaagaaacatcttcgggttgtgaggttaagcgactaagcgtacacggtggatgccctggcagtcagaggcgatgaaggacgtgctaatctgcgataagcgtcggtaaggtgatatgaaccgttataaccggcgatttccgaatggggaaacccagtgtgtttcgacacactatcattaactgaatccataggttaatgaggcgaaccgggggaactgaaacatctaagtaccccgaggaaaagaaatcaaccgagattcccccagtagcggcgagcgaacggggaggagcccagagcctgaatcagtgtgtgtgttagtggaagcgtctggaaaggcgcgcgatacagggtgacagccccgtacacaaaaatgcacatgctgtgagctcgatgagtagggcgggacacgtggtatcctgtctgaatatggggggggaccatcctccaaggctaaatactcctgactgaccgatagtgaaccagtaccgtgagggaaaggcgaaaagaaccccggcgaggggagtgaaaaagaacctgaaaccgtgtacgtacaagcagtgggagcatgcttaggcgtgtgactgcgtaccttttgtataatgggtcagcgacttatattctgtagcaaggttaaccgaataggggagccgaagggaaaccgagtcttaactgggcgttaagttgcagggtatagacccgaaacccggtgatctagccatgggcaggttgaaggttgggtaacactaactggaggaccgaaccgactaatgttgaaaaattagcggatgacttgtggctgggggtgaaaggccaatcaaaccgggagatagctggttctccccgaaagctatttaggtagcgcctcgtgaactcatctccgggggtagagcactgtttcggcaagggggtcatcccgacttaccaacccgatgcaaactgcgaataccggagaatgttatcacgggagacacacggcgggtgctaacgtccgtcgtgaagagggaaacaacccagaccgccagctaaggtcccaaagtcatggttaagtgggaaacgatgtgggaaggcccagacagccaggatgttggcttagaagcagccatcatttaaagaaagcgtaatagctcactggtcgagtcggcctgcgcggaagatgtaacggggctaaaccatgcaccgaagctgcggcagcgacgcttatgcgttgttgggtaggggagcgttctgtaagcctgtgaaggtgtactgtgaggtatgctggaggtatcagaagtgcgaatgctgacataagtaacgataaagcgggtgaaaagcccgctcgccggaagaccaagggttcctgtccaacgttaatcggggcagggtgagtcgacccctaaggcgaggccgaaaggcgtagtcgatgggaaacaggttaatattcctgtacttggtgttactgcgaaggggggacggagaaggctatgttggccgggcgacggttgtcccggtttaagcgtgtaggctggttttccaggcaaatccggaaaatcaaggctgaggcgtgatgacgaggcactacggtgctgaagcaacaaatgccctgcttccaggaaaagcctctaagcatcaggtaacatcaaatcgtaccccaaaccgacacaggtggtcaggtagagaataccaaggcgcttgagagaactcgggtgaaggaactaggcaaaatggtgccgtaacttcgggagaaggcacgctgatatgtaggtgaagcgacttgctcgtggagctgaaatcagtcgaagataccagctggctgcaactgtttattaaaaacacagcactgtgcaaacacgaaagtggacgtatacggtgtgacgcctgcccggtgccggaaggttaattgatggggttagcgcaagcgaagctcttgatcgaagccccggtaaacggcggccgtaactataacggtcctaaggtagcgaaattccttgtcgggtaagttccgacctgcacgaatggcgtaatgatggccaggctgtctccacccgagactcagtgaaattgaactcgctgtgaagatgcagtgtacccgcggcaagacggaaagaccccgtgaacctttactatagcttgacactgaacattgagccttgatgtgtaggataggtgggaggctttgaagtgtggacgccagtctgcatggagccgaccttgaaataccaccctttaatgtttgatgttctaacgttgacccgtaatccgggttgcggacagtgtctggtgggtagtttgactggggcggtctcctcctaaagagtaacggaggagcacgaaggttggctaatcctggtcggacatcaggaggttagtgcaatggcataagccagcttgactgcgagcgtgacggcgcgagcaggtgcgaaagcaggtcatagtgatccggtggttctgaatggaagggccatcgctcaacggataaaaggtactccggggataacaggctgataccgcccaagagttcatatcgacggcggtgtttggcacctcgatgtcggctcatcacatcctggggctgaagtaggtcccaagggtatggctgttcgccatttaaagtggtacgcgagctgggtttagaacgtcgtgagacagttcggtccctatctgccgtgggcgctggagaactgaggggggctgctcctagtacgagaggaccggagtggacgcatcactggtgttcgggttgtcatgccaatggcactgcccggtagctaaatgcggaagagataagtgctgaaagcatctaagcacgaaacttgccccgagatgagttctccctgactccttgagagtcctgaaggaacgttgaagacgacgacgttgataggccgggtgtgtaagcgcagcgatgcgttgagctaaccggtactaatgaaccgtgaggcttaaccttacaacgccgaagctgttttggcggattgagagaagattttcagcctgatacagattaaatcagaacgcagaagcggtctgataaaacagaatttgcctggcggccgtagcgcggtggtcccacctgaccccatgccgaactcagaagtgaaacgccgtagcgccgatggtagtgtggggtctccccatgcgagagtagggaactgccaggcatcaaattaagcagtaagccggtcataaaaccggtggttgtaaaagaattcggtggagcggtagttcagtcggttagaatacctgcctgtcacgcagggggtcgcgggttcgagtcccgtccgttccgccacttattaagaagcctcgagttaacgctcgaggttttttttcgtctgtatatctattattgccagaatcgcaaaaatcctctgcattttacgctctttttcctcaacagtctgaagcccataatcacctcagttaacgaaaatagcattaaaagaggcatattatggctatccctgcatttggtttaggtactttccgtctgaaagacgacgttgttattagttctgtgataacggcgcttgaacttggttatcgcgcaattgataccgcacaaatctatgataacgaagccgcagtaggtcaggcgattgcagaaagtggcgtgccacgtcatgaactctacatcaccactaaaatctggattgaaaatctcagcaaagacaaattgatcccaagtctgaaagagagcctgcaaaaattgcgtaccgattatgttgatctgacgctaatccactggccgagtccagacgatgaagtctctgttgaagagtttatgcaggcgctgctggaagccaaaaaacaagggctgacgcgtgagatcggtatttccaacttcacgatcccgttgatggaaaaagcgattgctgctgttggtgctgaaaacatcgctactaaccagattgaactctctccttatctgcaaaaccgtaaagtggttgcctgggctaaacagcacggcatccatattacttcctatatgacgctggcgtatggtaaggccctgaaagatgaggttattgctcgtatcgcagctaaacacaatgcgactccggcacaagtgattctggcgtgggctatgggggaaggttacagtgtaattccttcttctactaaacgtaaaaacctggaaagtaatcttaaggcacaaaatttacagcttgatgccgaagataaaaaagcgatcgccgcactggattgcaacgaccgcctggttagcccggaaggtctggctcctgaatgggattaagcctctctgacagctcctccgggagctgtttttacatgctcgctaaggaaatcgataaaagcccggatgcgcgtacttaccgcacggtcgctgtaatagacggcactgaatggcatttccactggcaacactttatctgccattaactccaccaattctccgcgagcgatttctttgtcgatcatgtagtcggacaaacacgcaatcccgttgccactcaggcaaagctgtttcagtgtttccccactattggaactcaaaccgtacttcacctcatgtaattgtccatcgctacgggctatcggccaggtattgagggaagcgggttcagtgaatcccaggcaaatatgttgctttaaatcgtcgatcgtttctggcttcccgtagcgggaaatataatcgggggaggcgataatttttcgataactgttaaataacggcctggcacgtaagctggaatccgttaacgtaccagcgcgtatcgcgacatccacttttctttcgatcaaattaataatcgtttcggaggagactaggctcaaagtgacttccggatagcgttcacggaaaggcttaattaacggcatcagaaagtgcagcaccactggagttgcggcatcgatccgtaacagtccacgcggtgtattacgcgtctccataatttcactttctgccgctgccatctcctgcaaaatactctgtacgcgacgaaaataacgctcgccttcttccgtcaggctaagttgtcgcgtggtccgattaagcaggctaacgccaagtttcatctccagctttttcaccgcccggcttaccgcactgtttgcttgccctaattgttccgctgcccggctaaagctgccgctttcgacgacgctaacaaaaatggcgagttcttcgctcgtggctttcatttttgctcctgttgcaaaatagaagagatattttgaatttatttgtcattaaaccatcaggatgcgtgatatgtcatgcgatttaatgttctccataatgagcaaaattctgaccggtgtaagcacttgcttacataacaatatacaattgctcgttgaaagagtgagctaaaatccctataacagtagaaccctcccgagtgcggaagggttgacgtaatagaggtttcaaagtcaaaagtgcgaaaaaacacctatgccatgcgctatgttgccggacaacctgcggaaaggatcttaccgccggggtcttttgcgagcatcggccaggcattaccacctggggaaccgttaagtaccgaagagcgtattcggatcctggtgtggaacatatacaaacagcaacgcgctgaatggttgagcgtattaaagaactacggcaaagatgcacatctggtgttattgcaggaagcgcagacaacgccagagttagtacagtttgcgaccgctaactatcttgccgccgatcaggtacccgctttcgtgctgccacaacatccttctggcgtaatgacccttagcgcggcacatccagtgtattgctgcccgttacgtgaacgagaacccattttgcgtctggcgaagagcgcactggtgacggtctatccattacctgacacccgcctgttgatggtggttaatatacacgccgtcaacttcagtctgggcgtggatgtctatagtaagcagttacttcctattggcgatcagatagctcaccacagcggcccggtcattatggcgggagatttcaatgcctggagccgtagaaggatgaacgcgttatatcgctttgcgcgggaaatgagcctgcgccaggtgcgttttaccgatgatcagcgccgtcgggcgtttggtcgcccgctcgattttgttttctaccgtggtctgaacgtcagtgaagcttctgtactggttacgcgcgcttccgatcacaatccgctactcgttgaattcagtcccggcaagcctgataaataaggtatgagtggtctgccacagggcagaccaacgtttggcgctgcgcaaaacgtgagcgcggtggtggcgtatgacttatctgcccacatgctggatgtcgtggcacaagctgccgaagcccggcaactgaaaaatatcaccacccgccagggatatgccgaaagtctgccatttgccgataacgcatttgatattgttatcagccgttattctgcccatcactggcatgatgttggtgcagcactgcgagaagtgaataggatattgaaacctggcggtaggctgattgtgatggacgtaatgtctccgggtcacccagtgcgcgacatctggttacagacggtagaagcattacgcgatacctctcacgtacgaaactacgccagcggtgagtggttgacgttaatcaatgaagccaatctgatagttgataatttaattacagataagttaccgctggaattttctagttgggtcgcgagaatgcgtacgccagaagcgttagtagacgctattcgcatttaccaacagagcgcaagcacagaggtgagaacgtattttgccttgcagaatgatggctttttcaccagtgatatcatcatggtagatgcacataaagcggcataaataaaaaaggcaccgggggaatcggtgcctttttattatctggtttgtcaggaatctggcatgttgttgtttttcacaaacaacgtcagcttatcgcctggttgcagattcgcagtgtcgctgttccagcgcatcacatctttgatgttcacgccgtggcgtttagcaatgctactaaggctatcgcctttgcgcacacgatacgtaatgctatcgctgttgtttgccagtcgctgtgcgctactgcctgcaccaatcgtcaaactttggcctggcttcagcttagatccgcgcagtttgttccactgctgcaaatctttggtgcttacgccgagacgactagcgatactactaagcgtgtcgccagagcgtacggtgtaaacacggctgttaagcggcgtattgtcggcaaccagcgtgctctgtacagcagcaatttcgccactagccagagattcacgcagttgatctgcatgcttctttggcaccatcacgtactgcgggccacttgcgcccagcgtggagccttttacgccagcgttgaatgtcttcagcttgctgacggaaatccccgccatatctgctaccttcgccatttcaaccgggctgctcaggtgcacacgcgccagagcacggctttcatcggtcgttggcagacgtacgccataacgcttgctgtttttgagaatatcactcaatgccagcattttaggcacgtactgcttcgtttcctgcggcaacggtaagctccagaagtccgtggatttcccacgcgctttgttcgttttaattgccttcatgacccgaccttcgccgctgttataagccgctacggtcagaagccagtcgccgtcaaacattttgttcagacgctgcatcatattcagcgcggcagttgcactagcaacaacatcgcgacgcgcgtcataattgcgggtctgtttcaaaccataattgcgccccgtgctcggaatgatctgccagatgcctgcggcattggcgccagacgttgcgtgaggatcaaaagcgctctccactatgggtagtagtaccagttccataggcatgttacgttttttaacttgccctgctatccagtacatatacggctctgcccgtaaagttacatcgtggagatagctcttattgcgtaaatatttctgtttctgttcgcgaatccggtcattttccggaattcccatctttagctcgtcgccaatgaaagcccacaagtcaccatctggcgcgatagacgtcccatcgtccatccatcgtgcctgacttgtaaactttgctgcttccccttgaccagctgcagaaaggctctgtgcgtgctgttgaacgttgccggtactctggcaacccacgagcaggacagaggcgagtaatatcgcttttgccttcatgtgtgtgtcaatagttgcttaaaagacgaccgatcataacggcgaacggagccgatgacaagaaagttttatcagaacctatctttcttactccttaaccatgcaaaacgctcttcaggttgttgcaataatgtttcttcattaattacattaattaaatcaatatcttccgttcttaaaaaaacattaatttgccgctcatttttcagaattacgggtagtgttatttgattttttgcccgtaactccttaactttacgataataatcatttatggacaaatcgtgcggaagaatactcaaagcaaacttcatattacttaaggtatattcatgagcacaacataccaatgtatcgtcaggtaacgcacttaactttttaagactttgatacatttgacttgctgtcccttcaaacaaccgaccacacccaccagaaaacagtgtgtcgccgcaaaatagataaggtttactgaagtaacagatatgtcctaaagtgtgacccggcgtagcaattacactaaattcatgccccaaaacgaaggcagtttcgccatctttgactacctgtgttgttcccttatcttgtgtctcttgtggaccatacaccacaatttgtggaaacttttccaccagttcttttacgccgccaacgtgatcgtggtgatggtgggtgagaaatatggcctccggttgccagttattggcggcaatggcgtttaatactggctctgcgtctccgggatcgacaatcaggcagcgacctgcttcatcattcaaaacccagatgtaattgtcatcaaaggcgggaatactgttaagattcatagattacctctcagtgtgaaacggaaggttgtgatgaaaccggcaagagtccctcaaactgtcgtggctcctgattgctggggcgatttgccctggggaaagctttatcgcaaggcgctggagcgccagctcaacccgtggttcactaaaatgtatggttttcatctgcttaagattggcaatttaagcgcagaaatcaattgcgaagcgtgcgcggtttctcatcaagtgaatgtttctgcgcaaggaatgcccgtccaggtacaggcggacccacttcatcttccttttgccgataaatccgttgatgtttgtctactggcacatacattgccgtggtgcaccgatccgcatcgtttattgcgtgaagccgatcgggtattgattgatgatggctggctggtcattagtggcttcaatcccatcagttttatgggattacgcaaacttgtgccggtattgcgcaaaaccagcccctataacagccggatgtttactctgatgcggcagctggactggctctctttgttgaattttgaagtgctacacgccagccgtttccacgttctcccgtggaacaaacacggaggaaaactattgaatgcgcatattcctgcgcttggttgcttacaacttattgttgcccggaaacggactattcctttaacgctaaatccgatgaaacagagtaaaaacaagccacgaattcgccaggcggttggagccacccggcaatgtcgtaaaccacaggcttaaacttcaacttggtagcctgtatcttccagtgtgggattcatcgccgcggcacgagccagttcatcacagcgttcgttttccgggtgtccggcatggcctttaacccattcccatttgatttgatgctgccccaatgcagcatcaagacgttgccagagatcgacattttttactggttttttgtctgcggttttccagccacgttttttccagttatggatccactgggtgataccctggcggacatactggctgtcggtactcaaaatgacttcgcaatgttcttttaacgcctccagcgcgacaatagcggccatcaactccatacggttgttggtggtgcgggtgtagccagcgctaaaggttttctcgcgtccgcgatagcgtaaaatagcgccgtaacccccaggtcctggattgcccagacagctaccatcggtgaaaatttctacctgtttaagcatctctggtagacttcctgtaattgaatcgaactgtaaaacgacaagtctgacataaatgaccgctatgagcactgcaattacacgccagatcgttctcgataccgaaaccaccggtatgaaccagattggtgcgcactatgaaggccacaagatcattgagattggtgccgttgaagtggtgaaccgtcgcctgacgggcaataacttccatgtttatctcaaacccgatcggctggtggatccggaagcctttggcgtacatggtattgccgatgaatttttgctcgataagcccacgtttgccgaagtagccgatgagttcatggactatattcgcggcgcggagttggtgatccataacgcagcgttcgatatcggctttatggactacgagtttagcttgcttaagcgcgatattccgaagaccaatactttctgtaaggtcaccgatagccttgcggtggcgaggaaaatgtttcccggtaagcgcaacagcctcgatgcgttatgtgctcgctacgaaatagataacagtaaacgaacgctgcacggggcattactcgatgcccagatccttgcggaagtttatctggcgatgaccggtggtcaaacgagcatggcttttgcgatggaaggagagacacaacagcaacaaggtgaagcaacaattcagcgcattgtacgtcaggcaagtaagttacgcgttgtttttgcgacagatgaagagattgcagctcatgaagcccgtctcgatctggtgcagaagaaaggcggaagttgcctctggcgagcataaatacctgtgaaaggcgctaaaaatagcgacttgggcgatttttgcagcaaacgattcaaaagatgagaaaaaccgttgacgaaggtcgaggcaatccgtaatattcgcctcgttcccaacggaacacaacgcggagcggtagttcagtcggttagaatacctgcctgtcacgcagggggtcgcgggttcgagtcccgtccgttccgccactattcactcatgaaaatgagttcagagagccgcaagatttttaattttgcggtttttttgtatttgaattccaccatttctctgttcaatgattttactctggcgtaggtgcgtgattctcgcttgttgtctcattcattaaaattcaataatgatatcgaaccattcagcttaaatatatttctagagaataaatttatattgattaaatgaatgtatatttcaaattgattttgtttgttattatttaagtgaggtatataattagagtccgttatcaatgctaaatattctaatcattatgacaggcgagggagtgtccaattatgaatagtaaaaagctttgttgcatatgtgtgttattcagcctgcttgcaggatgtgcctctgaatcttctattgatgaaaagaagaaaaaagctcaagtcacacaaagtaatattaataaaaacactccccagcaactgacagacaaagatttattcggtaatgaaaccactctggccgtatccgaagaggatattcaagctgcgcttgatggagatgagttccgcgttccccttaattctcctgtaatacttgttcaatccggcaaccgcgcaccggaaaccattatgcaggaggagatgcgaaaatattatactgtttccacattctctggtatcccggacaggcaaaagcctctgacttgtaacaaaaacaaagataaaaatgagaacgaggatgttgccagtgctgagaatatgaactggatgcaggcactgcgttttgtggctgcaaaaggacatcagaaagcgattattgtttaccaggatatgttgcagacaggaaaatatgactctgcgctgaaaagtacagtatggtccgactataaaaatgacaaactcactgacgctatctccctgcgctacctggtacgtttcacgctggtggatgtggcaacaggtgagtgggctacctggagcccggtgaattatgaatataaagtgcttccaccattgcccgacaagaatgaagccagtacgactgatatgacagagcagcaaatcatgcaacttaagcaaaagacctataaagcgatggtaaaagatttggttaaccgctatcaataataaattatatctgccgccaggaatttctggcggcaataatacaaaattctttgcataagaaatttttcttgacaaagacagtgcaagaaaggacatggaatccggagttaaaaactgtttgttttagaatatttaattatttaactgctgaatcttccttgcgagaaatatatccattattacatttcatgccatttttaatatagattgctcctgggaaaattcccgtattattaccgcaggggtgataattagtattgacatatcctgtgacaaaaggagctattaaaggtgctattacgatagctattagtaaaaatataagagttagctgtattgttatgtctgtggcgaaattgactaccttcgtttttttgattaagaatgattttattatcgtaagtaaaattacatgaatatttaaaaaggaaaacgacatgaaaccgaagcacagaatcaacattctccaatcataaaatatttccgtggagcattttattattgaatatagaggtttaactccggtaaaaaacaaagaagcattgaatgcagggaaaaataatatggccataaaaaacatcgaaagaaactcttttaatttaacatgtaaacgcatggttaatcctcatatcacgggtggagtgttaagaacatacataaatggagtcatgttttcccttttccatttatcaagttcctgttgccgttttagtccatctctaattgcatattttaatttttcacttaaatggcattgagcatcgatttcatttaaaacaactgtacacactatccctgtcagtaaaattgctcctccgacaagaattactggaaagccaaagctaacacaggcaaaagaagccagacttccaatagcggttgcaacaccaccggctataactgctttggccacatccatactaaaatcgccaagaaaattaaccagatctcgctcactactcataataaattctatggttctgctgatttaaccgcagagaagttcgccacagcaatccgaaaccactggcacgtggagaataagctgcacaggcgtctggacgtggtaatgaatgaagacgactacaaaataagaagaggaaacgcagcagaattatttagtgggatacggcacattgctattaatattttgacgaatgagaaggtattcaaggcagggttaagacgtaagatgcgaaaagcagccatggacagaaactacctggcgagtgtccttgcggggagcgggcttagctaataataccccgactctccccgtccttaaacacaacccccactcaccacaacctaaactcatccgcatcctgccatgccggaaacttttctctatattcccgcaatgctgccatgctcagctccgcatcaatgcgcgttgcctgatgcgcgtcggcagtagcgataatctctccttgcggattaatcacccggctgtcaccgcgataatggcagccgttgccatcgctgccgacgcgattgcatcccgccacatacgcctgattctcaatcgcgcgggccgtcagcaatgcctgccagtgcagagagcgcggagcaggccagttggcgacgtacagggcgaggtcataatcgttgagattgcggctccacacaggaaaacgtaagtcgtagcacaccagcggcaaaatacgccagccgcgccattccacaatcactcgcgcattgcccgctttataatgtagatgctcatctgccatgcggaacagatgacgcttatcataaaaatgtaccgtgccgcccggctcaaccagcaaaaagcggttaacgctaccagactccgtttgtaatgcaacactgcctgcaatcagcgcattgcactgctgcgccttagctgtcatccagttcactacgtcatcttgtgctaggctgctagctgccgcttccatggcaaagccgctggtaaacatctccggtagaacgatcacatcgcgcccggtaataccttccagttgacgatcaaaatgacgcaggttggcaggaccatccatccacaccagtggttgctgcaaaagcgtaatcttcaaaccaggcacggtgtacaactcctttatgcgaagggttttataactttaacaccttatcaggcagttgccttagcgcagaataaattgataacaaatgctgatattggaaatatctgatttgcaaattatcgtgttatcgccaggctttaggaggttaataacatgggcaggataagcagcggaggaatgatgtttaaggcaataacgacagtcgccgctctggtcatcgccaccagtgcaatggcgcaggatgatttaaccattagcagccttgcaaagggcgaaaccaccaaagctgcatttaatcagatggtacaagggcataagctgcctgcctgggtgatgaaaggcggtacttatactcccgcacaaaccgtaacgttgggagatgagacgtatcaggtgatgagcgcgtgcaaaccgcatgactgtggcagccaacgtatcgctgtgatgtggtccgagaaatctaatcagatgacggggctgttcagcactattgatgagaaaacgagccaagagaaactcacctggctgaatgtgaacgatgcgcttagcattgatggtaaaacggtgttgttcgcggcgttgaccggcagcctggaaaaccatccggatggctttaattttaaataattagcggataaagaaacggagcctttcggctccgttattcatttacgcggcttcaactttccgcactttctccggcaactttaccggcttcgtcgccagctcttccggatcaaagtcatcaacgttaatactgcgcagacggctttcttcagctttcaccagaatagcggcttcatctttatcaatcagccccttcaccagcgcgttgtgcgccagttcatccagacgggtaaacggcaggtttttacccagctctttacagatccgctgatgaattgggtcggcggcaatcacatccaccagcgcctcttccagcaagccaaccggattatgctcgctcggcgtcaggtactgaccgcgaccaatgcgggaacgggtggcgttcggcacttgtaaaatcttcgccactttatgatccagcttgtcagaaggtgccagataatgacgtccggtcgggaagatcaccacattcagcagcccggcaaccacgcggttcgggaagttttgcagtaaatcatccatcgcctgttcagcctgatacagcgcatcttgtacgccccagtgcaccagcggcaggtcggcttcattacggccttcgtcgtcataacgcttcagcacggcagaggcgaggtagagctggcttaaaatatcccccagacgggcgctgatgcgctcgcgacgtttcaggctgccgcccagcactgccatgctgacatcagaaagcagggcgaggttggcgctcaggcggttcaggtgctgatagtagcgtttagtggcatcgccggttggcgtgctgctggttaaaccgcgcgtcaggcccagccagaagctgcgaactttgttgctaccgacgtgaccgatatgtttgaacaacagtttatcgaacgcgttgacgtcattgttcttcgccgcttccatctcttccagcacgtacggatggcaacgaatcgctccttgtccgaagatcatcatgctgcgggtcagaatgttagccccttcaacggtgatggcaatcggtgcgccctggtaagcacgcgccaggaagttgctttgcccgagcataatgcctttaccgccggtaatatccatcgcatcaataatgttctgctgcccgcggtgggtacagtgatacttaacgatagcgctcagcacggcaggtttttcgccgagcataatgccgtaggtaatcaggcttgccgcagcatccatcacgtaggcattaccggcaatacgcgccagcggctcttcaatcccttccatcttaccaatagagattttgaactgacggcgaatgtgagcatacgcgccggttgccagcgctacgcttttcacgccgccggtactgttggaaggcagggtgatgccgcggcctacgctgaggcactccaccagcatccgccagccttgcccggccattttcggcccgccgatgatgtaatcgatcggcacgaagacatctttaccgcgcgtcggtccgttctggaacggtacgttcagcgggaagtggcgacgaccaatttccacgcccggcgtggtggttgggatcagcgcacaggtaatgcctaaatcttctgcaccgccgagtaatttttccgggtcggagagtttaaacgccagcccaagcacggtcgcaatcggtgccagcgtaatgtagcgtttgttccaggtcagacgcatccccagcacctgctggccctgccattcgcccatgcagacaatcccggtgtccggaatcgcgcccgcatcggaacccgcttccgggctggtcagtgcaaagcaggggatctcctgaccacgcgccagacgcggcagatagtgatctttctgctcgtcagtgccgtaatgttgcaacagttcgcccgggcctaaactgtttggcacgccgacggtaatcgccaggatcccgctcacgccggagagtttttgcagcacgcgagactgggcataagcgctgaactccagcccgccgtactcttttttgatgatcatcgcgaagaaacgatgctctttaaggtacgcccacaactccggcggcagatccgccagctcatgggtgatctggaaatcattcgccatccggcaggcttcttctaccgggccgtcgagaaacgcttgctcttcggcggtcaggcgcggctgcggatagttatgcagctttttccagtccggcttgccctggaacaagtcgccctcccaccaggtggtgcccgcatcaatcgcttctttctcagtgcggctcatcggcggcatcaccttacggaaaccgcgaaataccggcgcggaaatcatgctcttacgcataggcgcaaagttaaatggcacgaggataatggccagaggcaccagtacccacgcgctccacagaccagcaacgccgagggcggctgtccaggcgagcaaaatcagactgctgataaataagctcacgcggtgatagaacaacgcgccgagcaggacaaccgtagcgagaatactcaaaatcatcataacgaaaagccccttacttgtaggaggtctgaccacttgtgatgatatggttgtagtggatgtaaaaacatttagcaatatgtttacaatataattacaacaaagctcacattgttgctgtttttatccgcacttcaggtcaaaaagtcctggtcatagcacctgcccgtacttctcgcttttggcggtatccggtacactgcattttgtctattacatttatgctgaaggatatcctcatgtaccaggatcttattcgtaacgaactgaacgaagcggcggaaacgctggctaactttttaaaagatgacgccaatattcacgccattcagcgcgcggcggtcctgttagcagacagctttaaagccggtggcaaagtgctttcctgcggcaacggcggttcccattgcgacgctatgcactttgccgaagagttgaccggtcgctaccgtgaaaaccgtccgggctacccggcgattgctatttctgacgttagtcatatttcctgcgtcggtaatgatttcggtttcaatgatattttctcccgctacgttgaagcggtaggtcgcgaaggcgatgtactgctggggatctccacctccggtaactctgcaaacgtgatcaaagcgatcgcagcggcgcgtgagaagggaatgaaagtgatcaccctgaccggtaaagacggcggcaaaatggctggcacggcggatatcgaaattcgcgtaccgcactttggttatgccgaccgcattcaggagattcacattaaagtgatccatatcctgatccagttgattgaaaaagagatggttaagtaagtctggcgtaggccggataagacgtttacgccgcatccggcatttgtgcgctgatgcctgatgcgacgctgacgcgtcttatcatgcctacaaatctgtacgcgaaccgtaggccgaataatgcgttcacgccgcatccgacctgaaaattcttaaatcaatcttcgccgggggccatgcgctcccgctgttgtggaggttacccatgtgcgaattgctcgggatgagcgccaacgtccctaccgatatctgctttagtttcaccgggcttgtacagcgtggtggtggaaccgggccacataaagatggctggggcattaccttttacgaaggtaaaggctgtcgcacatttaaagatccacaacccagctttaattcccccatcgccaaacttgtccaggactacccgataaaatcctgtagcgtggtggctcatattcgccaggctaatcggggcgaggtggcgctggaaaatactcacccatttacccgcgagttatgggggcgtaactggacttatgcccataacggacaactgacgggctacaaaagtctggaaaccggcaacttccgcccggtaggcgaaaccgacagcgaaaaagccttctgctggctcctgcataaattaacgcagcgttacccgcgcacaccgggcaacatggcggcggtatttaaatatatcgccagtctggcggatgaactgcggcagaagggcgttttcaacatgctgcttagcgacgggcgctatgtaatggcgtattgcagcactaatttacactggatcacccgccgcgcgccgtttggcgtggcaacgttgctggatcaggatgtggaaatcgacttcagcagccagaccacaccgaatgatgtggtcacggtgattgcaacacagccgctgacgggcaatgaaacctggcaaaagattatgccaggcgaatggcgcttattttgcctcggggagcgtgtagtttgattattttgcctcggggagcgtgtagttacttgccagttgtggctgcacaacttcgtggcttaacggcttgctgaccacgtaacgaccattgaccacagaaacggttggtggcttacgggtttgctcaaagtagtcgtaacccggcttcagttgctcccagaagtccttaaagttggaatatttatggcgcttcatattggcgtcggtcatgcggaacgggtaaatactcacttgcacgctcggctgaccaaacaccagcgcaccagtaacgaactggaatatctcatcaataccctgattggtcattgcgtagcagccgatggaaacacaatcgccgtggatcatcaggtatttcccttcataaccatgcgcacggtcataggcattggggaaaccaatattaatcgctttgtagtaacggctgtctggttttaactgattacgctggacgctataaaacccttccgggcttttgaaatcgccctgacgctgttttggccctaagccgccggaatatttacagattttatagctgtcgagcagttgatattgctcgcccattttgacgtagagatcgagcgtacgttcttccttgaagatctggatgtagacaggggatcccatcaactgctgcttatactctttgctcacaggcgtggtagagctactgctgcccagcaaaccggcaaaactaacgcacgggatcaacaacatcgcaagaattaatgcgattttacgcatactgcttattccttgataaaacggttacacacgccaggacggcaaaatggatcccaaatcggaatagtctggatttggaaggctcacattatcaccaaaagagttttacgcaagcctgtcggcgcagggtttacaaatttcatcggaagcgggctttacccaaagagcgccgcgtgagttccagttctctcaaatcgtaaaagtttatcggtaagtttgtaaatcaggatccagtccggttcgacatgagcatcgcgataacctttccaactaccttgcagcgggtggtctttataaacagctggaagcggtaaagtattattgataagaagcgtcataagatatttcaatttattcatatccttatgacgcttttgtgcaagttttacatccttactatattgtccgctgtattcaatatccctttgaatcatatttaaattcctaatttatcaaataaatcatcggcgtctttggccttatgaacatcaatgccagcttcgctgtttttgatactttgaatggttaattgattaggctcgcgtaaatcaaacggcaatgccttttcacgcgcgacctttgtgagggttatgcgaaccaggtcagagatggtcagccccatcccggccagtacgtccgctgcctgattcttcagatcttcatcgattcgggcgcgaacaaacgcgttagcagccattggggtatctcctgtgctgtatatttattcagcttgaattgtagctcaaatgagcaacagcgacaatccatgagtaatttaataaacggatgtttttacataattaactgaaatatatatgttaattttataataatggtttattaagtttgttcagaaacgatccgggatacactgcaacattaaagcatgaccagccattattgagtatgtccttgccgagcattccatcctttgtattgagcggattactgttgatttgtttgccgttttctagttttgccagcgccaccacaagtcatatctctttcagctacgccgcccgccagcggatgcaaaaccgtgcgcgtttattaaaacagtaccaaactcatctgaaaaagcaggccagctatattgtggaaggcaatgccgaaagcaaaagggcgctacgccagcacaaccgggagcagataaaacagcatccagaatggtttcctgctccgctcaaggcgagtgacagacgctggcaggcgctggcggaaaacaaccactttttaagcagcgaccatctgcataacattaccgaagtggcgattcaccgcctggagcagcagcttggcaagccttacgtctggggcggtacgcggcctgataaaggctttgactgtagcgggttggttttttatgcctacaacaagatccttgaggctaagctcccgcgcacggccaatgagatgtaccactatcgccgggcaacgattgtggcgaacaacgacctgcgccggggagatttgctgtttttccatatccacagccgcgagatagccgatcatatgggcgtgtatttgggcgatgggcaatttatcgagagcccacgtaccggcgaaaccattcggataagccgattagccgaacctttctggcaggaccattttttgggcgcgcgcaggattttgacggaagagacgattttgtaagacggataaggcgtttacgccgcatccggcagttgtacgcaggtgcctgatgcgacgctggcgcgtcttatcatgcctacgagcccgcgaatatttgcgagccgctttcccgatataaaacaacctcattgccaacctttccttttcttcttaccgttgagaaaaaggagtcgccatgtctgaatatcgtcgttattacatcaaggggggaacatggtttttcacggtgaatttacgaaatcgtcgaagccaacttttgaccacccagtaccagatgctccgtcacgccattattaaagttaagcgagacaggccttttgaaatcaacgcctgggtcgttttgccagagcatatgcactgtatctggacattacctgaaggcgatgatgatttttccagccgctggcgggaaattaaaaagcaatttacccatgcttgtggattgaaaaatatctggcaaccacgtttttgggagcacgccatccgcaataccaaagattataggcatcatgttgattatatttatataaatccagtaaagcatggttgggtaaagcaagtgagtgattggccattcagtacgttccatcgcgatgtcgcgcgagggttatatcccatcgattgggcgggggacgtaacggattttagtgccggggagcgtatcattagttaattgtgcgcagatgcctgatgcgacgctagcgcgtcttatcatgcctacaaacttgtgccggatcggtaggccggataaggcgtttatgccgcatccggcagttatgcgcagatgcctgatgcgacgctggcgcgtcttatcatgcctacaaacttgtgcctgaacggtaggacggataaggcgttcacgccgcatccggcagttgtgcaccaatgctggatacttacatcaacgcccccataatcttcaactccagctcatccggcacttcgttatacgacagcacatgcagccccggcgcaaacaaccttgcataacgcgccagcaaagggcgcagctgcggtggcaccagcagcaccgggtctttccccgccgctttcatctgctctttcacctgtggcatcgtactctggaactggttgagcatattcggatcgaccggcacgctgtcgagcatcactttcccgccctgttgcgcctgattcaccacgttggtcagcagattttccagctcattattcagcgtatacaccgtcagctcctgcttgcgaacgaacggatgggtaatgctgcgccgcaatgccaggcgcacatcggccgccagcagaatatgatctttcgtcaccgtgctactggcgaccagcacggtggcgatggtgacgatatcgcgcagggaaacgccttcggtcagcagcgcccggtacactttcagcaactggctgtaattgagcgccgcgctcaaatcttccgccagacgcggtgccgtcgacgataaacggttatgcaactgcgtaatatcatcatagttaaacaaatcaggaatatagctgcgcacaatcttatttacatgggtagcgatcacgctggcgctgtcgatcacctgataccccatattcagcgccttcgctttctgcgccgcctggatccaggtgaccggcatcccgtacgccgggtcgttcccctgcacgccgtcaatctcgccgtaggtttcgctggagggcagggccatcagtttatccgccggaatatccgcttcatcagcctttatgccgttgatgaaaatggcgtactgactgggcttaaggcggaagttttcccgaatgcggatctccggcagcagcacgccgttgccgtcagaaatcacctgccgcacgccgcgaatccgctgggtgagcgggttaccctgtgctttgtccaccagcgccaccagtttgtaaccgaggcttaaactgataggctcgatcagcggaatggtttcccaactgacctgctgctcgctggtttcggtgatggtgcgggtcagcgtttcgaggcttttctcttccgcctccgccgccagcggctgtttgctcatccgccagccggtaaaaccaagcagggcgctgaacagcaaaaacggcaggtgcggcattcccggtaccaccgccagcacgaacataatcccggtggcggtgtagagcaccgacgggcttgccagcagctggttacgcacgtcatgggcgatatcgccgttgtcgctgacgcgggtgacgataatcgccgccgcggtggagagcagcagggaagggatctgcgccaccaggccgtcgccgatggtcatcagcacatactgctggaaggcagcatcggcgctcaggttgtatttgaagatcccgatacagacgccgccgatcaggttgatcgccagaatcatcatcccggcgatggcgtccccgcgcacaaacttcgatgccccgtccatcgcgccgtagaaatcggcctcgctggcaacatctttacgccgggtttgcgcctgcgcctggttgatcaatccggcgttaagatcggcgtcaatcgccatctgtttgccgggcatcgcgtctaaggtaaagcgggcagaaacctcggaaatacgctcggcccctttggtgacgacaataaagttgattgtcaacagcgtcagtaaatccgagcgtgaaagcattatcgccgcgctgcacgggcagtcgatttttaacggtggtgggctgtcgccgttaaataaaatcagcccgtctcatccgccaaaacctgccaccgtggcggtgccggaagagacggagaaaaaagcgcgtgatgtgaatgagaaaacggcgctgctgaagaagaaatccgccaccgagcttggtgagctggcaaccagtatcaacaccattgcccgtgatgcgcatatggaagcgaatctggagatggagattgttccccagggattacgcgtgctgattaaagacgaccagaaccgcgatatgtttgaacgcggcagcgcgaagattatgccgttctttaaaacgctgctggtggagctcgcgccagtgttcgactcgctcgataataaaattattattaccgggcataccgatgcgatggcctacaaaaacaatatctacaacaactggaacctttcgggtgaccgcgcgctttcggctcgtcgggtgctggaagaggccggaatgccggaagataaagtgatgcaggtaagcgcaatggcggaccagatgctgctggattccaaaaatccgcaaagcgcgggcaaccggcgcattgagattatggtgctgaccaaaagtgcgtccgatacgctgtatcaatactttggtcagcatggggataaagtggtgcagccgctggtgcaaaagctggataagcagcaggtgctttcgcagcgaacgcgttaaatgctgaatctttacgcatttctcaaaccctgaaatcactgtatactttaccagtgttgagaggtgagcaatgcgtaaaatcattcatgtggatatggactgctttttcgccgcagtggagatgcgcgacaatcccgccctgcgcgatatccctattgctattggcggcagccgcgaacgtcggggggtgatcagcaccgccaattatcccgcgcgtaaatttggcgtacgtagcgctatgccgacagggatggcgctcaaattatgcccacatctcaccttgcttccggggcgctttgacgcctacaaagaagccagtaatcatatccgtgaaatcttcagccgctacaccagccgcattgaaccgttgagtctggatgaggcttatctcgatgtcaccgatagcgtccattgccacggttctgcgaccctcatcgcccaggaaatccgccagacaatcttcaacgagctgcaactgacggcgtctgcgggcgtggcaccagtaaagtttctcgccaaaatcgcctccgacatgaataaacccaacggccagtttgtgattacgccggcagaagttccggcatttttacaaaccttaccgctggcaaaaatccccggcgtcggcaaagtcagtgcggcaaaactggaagcgatggggctgcggacctgcggtgatgtacaaaagtgtgatctggtgatgctgcttaaacgctttggcaaatttggccgcattttgtgggagcgtagtcaggggattgacgaacgcgatgttaacagcgaacggttgcgaaaatccgtcggcgtggaacgcacgatggcggaagatattcatcactggtctgaatgtgaagcgattatcgagcggctgtatccggaacttgaacgccgtctggcaaaggtaaaacctgatttactgattgctcgccagggggtgaaattaaagttcgacgattttcagcaaaccacccaggagcacgtctggccgcggctgaataaagctgatctaatcgccaccgcgcgtaaaacctgggatgaacgccgcggcgggcgcggtgtgcgtctggtggggctgcatgtgacgttgcttgacccgcaaatggaaagacaactggtgctgggattatgatgtatactattatgtatattctggtgtgcattattatgagggtatcactgtatgcatcgaattctcgctgaaaaaagcgtcaatatcactgagttacgtaaaaacccagctaaatactttattgatcaaccggttgcggttctttctaataatcgccccgcaggatatctcttaagtgccagcgcattcgaagcgttaatggacatgcttgctgaacaagaggagaaaaagcccataaaggcgcgcttccgtccaagtgctgcaagattagaggaaattacacgccgcgctgaacaatatcttaatgatatgacggatgatgatttcaatgactttaaggaataaggatgcgggtattcaaaacaaaacttattcgcctgcaacttacagcagaggaacttgatgcgttaacggcggattttatttcctataagcgtgacggtgttttgccagatatatttggtcgcgatgcactctacgacgactcctttacctggccattaatcaaatttgagcgagttgctcatattcatctggcaaatgagaataatccatttccgccacagttgcgccaattcagcagaacgaatgacgaagcgcatttggtatattgtcagggggcgtttgatgagcaagcatggttgctcattgccattctgaaacctgaacctcataaactggctcgagataacaaccaaatgcataaaattgggaaaatggcagaagcgtttcgcatgcgtttttgaatttatattatgaataacatacaaataagaaactatcagcctggcgattttcagcaactatgcgctattttcattagagcggttacgatgaccgccagtcagcattatagtccacaacaaatttccgcctgggcgcagattgacgaatctcgctggaaggagaaactcgcgaaaagtcaagtgtgggttgcgatcattaatgcacaaccggttggttttatttcccgcattgaacattatatcgatatgttatttgttgaccctgaatacacccgccgtggggttgccagcgctttgttaaaacctttgattaagtctgaatccgaacttacggtggacgcaagcataaccgcaaaacccttttttgaacgttatggttttcagacagttaagcagcagcgcgttgaatgccggggagcgtggtttactaatttttatatgcgatataaaccgcaacattaaatccagcttgcaatgaaaataacgcccgcctggtatgtgcgcgttttctgattccacaaactgcaaggaggtaaatcatgacaaatcctttatcaatgactctttgcagacctttccaggattaattctttttttcttgccctggattcgtctgccatttcctgatttttatatttatatactctaaataattcgagttgcaggaaggcgacaagcgagtgaatcgccaggagcttacataagtaagtgactggggtgaacgaacgcagtcgcagtacatgcaacttgaagtatgacgagtataaatggaatggtacatgggcaaatatattcgtcccttatccgatgcggtatttaccatcgcatctgatgacctgtggatcgagagtttagcgatccaacaattacacaccacggcaaatttacccaacatgcagcgcgtagtggggatgccagatttacaccccggacgcggctacccgattggcgcagcgttcttctctgttggtcgtttttacccggcaagacgtcgcggtaacggtgctggaaacagaaacgggccgctactctgacacactgcgtagcgcgctggtttctctcgatggcgataacgcatgggcattaagcgaaagctggtgtggcactattcagtggatttgtccgagtccgtatcggcctcatcatgggcgcaaaaactggtttctgggcattgggcgttttaccgctgatgagcaggaacaaagcgatgcaatccgttatgagacgctgcgtagcagcgggccgggcggtcaacatgtcaataaaaccgacagcgcggtacgcgccacgcatttggcatccggtattagcgtgaaggttcagagtgagcgtagtcagcatgctaacaagcggctggcacgattgctgattgcctggaagctggagcaacagcaacaggaaaatagcgcggcgctgaaaagccagcggcgaatgttccatcaccagattgaacgtggcaacccgcgacggacatttacagggatggcttttatcgaaggataatgaaggatgaaactgccggaaggcgattaaacgccatccggcagcaaatcaaataattacttcgccggaatttctttcagcagttcagtcagcagtgtccagtaatgacctacgctttcgatgtgaacttgctcatccggagagtgtggaccggtgatagttggcccgatagaaaccatgtccatttccggatacggttttttgaacagaccacattccaggcccgcgtggataatctggatgttcggcgtcttgttgaacaggcgctgataggtttcacgtaccagatgcatcaccggagaattagcgtccggctgccagccaggatatgcgcctttcgcttcggttttcgcgccagccagtttacccaggctatccagcatgctcaccacgtagtctttaccgctgtcgatcagactacggatcaggcagtgaatttctacgttattgtcagtcatggtcaccacaccgacgttcagggaggtttcaaccacacctttggctacatcggagttacgaatcacaccgttcggggtggcgttcagcagacgaataaaggtatcgcgagatttcgcaatcagggcagctttatcgttcgctacagagtccagcaacaaggccagatttttctctttttctgccagctcgtttttcaggatctcctgataggtattcaccagagatttcaggacgtcgactttatcagctgcgacagcaatggtcgcaaaggcttcacgcgggatggcgttacgcagtgtgccgccgttgaaatcgataaggcgcagatccagttcttccgcatgacccgccaggaagcgcaccagcagtttgttggcattacccagcccaacgtggatttccccgccggagtgaccgcctttcagaccttttaaggttaacttgaaggtttcaaaaccagctggaaccgcttcacgatctaaatgcaggttggaggtgaagtcgataccccccgcacaacccatgtagatttcaccttcttcttcggagtcggtgttaatcagaatatcagcctgcaaccagttgccctgtaagccgaacgcaccgtccataccggcttcttcggtcatggtcagcagcacttccagcgggccgtgaaccacgttttcgtcagccagaaccgccagcgcagaggccataccaatgccgttatccgcacccagcgtggtgccgcgcgctttaacccattcgccatcaatataaggctggataggatctttcgtgaagtcatgcacggtgtcgttatttttctgcggcaccatatcgaggtgggcctgtaagacgaccggtttacgattttccatacctgcggtagcaggtttacgaatcaggatattacctacctgatcgcgttcgacatggaaacctttctcttttgcccaaccaacaatgtattcagcgagttgctcttcatgataggacgggtgaggaatagaacagattttggcaaaaatatcccacagcggctgtggagataattgagacagttcagacacgttaagtctccttgtcgatcacccgcaaaacagtattgcaggtcacagggttagcagaaaatgttgtcaacacaagacaggcttgcgagatatgtttgagaataccactttatcccgcgtcagggagaggcagtgcgtaaaaagacgcggactcatgtgaaatactggtttttagtgcgccagatctctataatctcgcgcaacctattttcccctcgaacactttttaagccgtagataaacaggctgggacacttcacatgagcgaaaaatacatcgtcacctgggacatgttgcagatccatgcacgtaaactcgcaagccgactgatgccttctgaacaatggaaaggcattattgccgtaagccgtggcggtctggtaccgggtgcgttactggcgcgtgaactgggtattcgtcatgtcgataccgtttgtatttccagctacgatcacgacaaccagcgcgagcttaaagtgctgaaacgcgcagaaggcgatggcgaaggcttcatcgttattgatgacctggtggataccggtggtactgcggttgcgattcgtgaaatgtatccaaaagcgcactttgtcaccatcttcgcaaaaccggctggtcgtccgctggttgatgactatgttgttgatatcccgcaagatacctggattgaacagccgtgggatatgggcgtcgtattcgtcccgccaatctccggtcgctaatcttttcaacgcctggcactgccgggcgttgttctttttaacttcaggcgggttacaatagtttccagtaagtattctggaggctgcatccatgacacaggcaaacctgagcgaaaccctgttcaaaccccgctttaaacatcctgaaaccagcacgctagtccgccgctttaatcacggcgcacaaccgcctgtgcagagcgcccttgatggtaaaaccatccctcactggtatcgcatgattaaccgtctgatgtggatctggcgcggcattgacccacgcgaaatcctcgacgtccaggcacgtattgtgatgagcgatgccgaacgtaccgacgatgatttatacgatacggtgattggctaccgtggcggcaactggatttatgagtgggccacccaggcgatggtgtggcaacaaaaagcctgtgcggaagacgatccgcaactcagtggtcgtcactggctgcatgcggctacgttgtacaacattgccgcctatcctcatctgaaaggagatgacctggccgagcaagcgcaggctttgagtaaccgcgcctatgaagaggccgctcagcgtctaccgggcacgatgcggcagatggagtttaccgtacccggcggtgcgcccatcaccggctttttgcatatgccgaaaggcgatggcccgttcccgacggtattaatgtgtggtggtctggatgcgatgcagacggactattacagcctgtatgaacgttattttgcgccgcgcggcattgcgatgctgactattgatatgccgagcgtgggcttttctagtaaatggaagctcacccaggactccagcctgttgcatcagcacgtcttaaaggcgctgcctaacgtaccgtgggtggatcacactcgcgtcgcggcctttggtttccgtttcggcgctaacgttgccgtgcgtctggcataccttgaaagcccgcgtctgaaagcggttgcctgtcttggtccggtagttcataccctgttgagtgattttaagtgccagcaacaggtgccggaaatgtatcttgacgttctggccagtcgtttggggatgcatgatgcttccgatgaagcgttgcgcgtggagctgaatcgctatagtttaaaagtgcaaggattgctgggacgtcgctgcccaacgccaatgttaagtggctactggaagaacgatccgttcagcccggaagaggacagtcgcttaatcaccagtagttctgctgacggtaaattattagagatcccatttaacccggtgtatcggaattttgacaaaggtcttcaggaaatcaccgactggatcgaaaaacgcttgtgttaaaaatttgctaaattttgccaatctggtaaaacagttgcatcacaacaggagatagcaatgacgttaccgagtggacacccgaagagcagattgatcaaaaaatttaccgcactaggcccgtatattcgtgaaggtaagtgcaaagataatcgattctttttcgattgtctggctgtatgcgtcaacgtgaaaccggcaccggaagtgcgtgaattctggggctggtggatggagctggaagcgcaggaatcccgttttacctacagttaccagtttggtctgttcgataaagcaggcgactggaagagtgttccggtaaaagacactgaagtggttgaacgactggagcacaccctgcgtgagtttcacgagaagctgcgtgaactgctgacgacgctgaatctgaagctggaaccggcggatgattttcgtgacgagccggtgaagttaacggcgtgagtgaaatgtgccggatgcatcacatccggcaatattcattaaaactgatacgtcatgccaaccgcgacaatatcatcattattaatattcaatttgttatcgctatccagttggttgattttataatcaacaaacgcactcatatttttgttgaaataatacgtagcaccgacgtcgatataattgaccagatcttcatcaccgataccttcaatatctttccctttgcttaagacataacccaggcttggacgcagaccaaagtcaaactggtattgagcgaccgcttcaaagttctgtgtcttattggcaaagccgccagttattggcgtcattttgcgtgtttcagaatagaaagttgccagataaatattattggcatcgtatttcagacctgttgcccatgcttctgcacgcttgcctgtgccacggctttgcaggttctgctcgttggtgcgatcactgttggtataggccccactaatggcgaaatcgctgccgccaaagtcatatgtcaaactcgtgccgaagccatcgccgttttgctttttaacgtcgcggttttcgtttttcccttgatattgcagggttaagttcaggccatcgataacgccgaagaagtcggtgttccgatacgtcgccagaccgctggcgcgtttggtcataaagttgtcggtctgcgcgctggaatcgccaccaaattccgggaacatatcggtccaggcttccacgtcatacaacgcccccaggttacgaccataatcgaaagaacccaaatctttatatttcaacccggcaaaagcgagacgcgttttttgctgtgcagtatcactctctgctttattaccggcaaactctgcttcccaacgaccataaccagtcagttgatcgttaatttgtgtttcgcctttgaaaccaaaacggatataactctggtcgccatctttactggcgttatcactcatataatgcatggctttaactttgccatagacatccagtttattaccgtctttattatatatttctgcagcctgtacagatgcagatgccacaatgcccatcaccactaatgccagagtgctctttttcattttcattcctgattttaattaacgcgcgaatattcagcgggagagtcccgttgaaaacaggaaagtttttaacctgagattgttaaagatatattacagattaataatattcttaaaatgtggtaatttattaaatctgtaataaaagcgtaaacaactgccgctaggcttgctgatcccgcgcaacaaaacgccatgctttgctcgcagatggttggcaaccgacgacagtcctgctaaaacgttcgtttgatatcatttttcctaaaattgaatggcagagaatcatgagtgacagccagacgctggtggtaaaactcggcaccagtgtgctaacaggcggaagccgccgtctgaaccgtgcccatatcgttgaacttgttcgccagtgcgcgcagttacatgccgccgggcatcggattgttattgtgacgagcggcgcgatcgccgccggacgtgagcacctgggttacccggaactgccagcgaccatcgccagcaaacaactgctggcggcggtagggcagagtcgactgattcaactgtgggaacagctgtttagcatttatggcattcacgtcgggcaaatgctgctgacccgtgctgatatggaagaccgtgaacgcttcctgaacgcccgcgacaccctgcgagcgttgctcgataacaatatcgttccggtaatcaatgagaacgatgctgtcgctacggcagagattaaggtcggcgataacgataacctttctgcgctggcggcgattcttgcgggtgccgataaactgttgctgctgaccgatcaaaaaggtttgtataccgctgacccgcgcagcaatccgcaggcagaactgattaaagatgtttacggcattgatgacgcactgcgcgcgattgccggtgacagcgttagtggcctcggaactggcggcatgagtaccaaattgcaggccgctgacgtggcttgccgtgcgggtatcgacaccattattgccgcgggcagcaagccgggcgttattggtgatgtgatggaaggcatttccgtcggtacgctgttccatgcccaggcgactccgcttgaaaaccgtaaacgctggattttcggtgcgccgccggcgggtgaaatcacggtagatgaaggggcaactgccgccattctggaacgcggcagctccctgttgccgaaaggcattaaaagcgtgactggcaatttcagccgtggtgaagtcatccgcatttgcaacctcgaaggccgcgatatcgcccacggcgtcagtcgttacaacagcgatgcattacgccgtattgccggacaccacagccaagaaattgatgcaatactgggatatgaatacggcccggttgccgttcaccgtgatgacatgattacccgttaaggagcaggctgatgctggaacaaatgggcattgccgcgaagcaagccagctataaattagcgcaactctccagccgcgaaaaaaatcgcgtgctggaaaaaatcgccgatgaactggaagcacaaagcgaaatcatcctcaacgctaacgcccaggatgttgctgacgcgcgagccaatggccttagcgaagcgatgcttgaccgtctggcactgacgcccgcacggctgaaaggcattgccgacgatgtacgtcaggtgtgcaacctcgccgatccggtggggcaggtaatcgatggcggcgtactggacagcggcctgcgtcttgagcgtcgtcgcgtaccgctgggggttattggcgtgatttatgaagcgcgcccgaacgtgacggttgatgtcgctagcctgtgcctgaaaaccggtaatgcggtgatcctgcgcggtggcaaagaaacgtgtcgcactaacgctgcaacggtggcggtgattcaggacgccctgaaatcctgcggcttaccggcgggtgccgtgcaggcgattgataatcctgaccgtgcgctggtcagtgaaatgctgcgtatggataaatacatcgacatgctgatcccgcgtggtggcgctggtttgcataaactgtgccgtgaacagagcacaatcccggtgatcacaggtggtataggcgtatgccatatttacgttgatgaaagtgtagagatcgctgaagcattaaaagtgatcgtcaacgcgaaaactcagcgtccgagcacatgtaatacggttgaaacgttgctggtgaataaaaacatcgccgatagcttcctgcccgcattaagcaaacaaatggcggaaagcggcgtgacattacacgcagatgcagctgcactggcgcagttgcaggcaggccctgcgaaggtggttgctgttaaagccgaagagtatgacgatgagtttctgagtttagatttgaacgtcaaaatcgtcagcgatcttgacgatgccatcgcccatattcgtgaacacggcacacaacactccgatgcgatcctgacccgcgatatgcgcaacgcccagcgttttgttaacgaagtggatagctccgctgtttacgttaacgcctctacgcgttttaccgacggcggccagtttggtctgggtgcggaagtggcggtaagcacacaaaaactccacgcgcgtggcccaatggggctggaagcactgaccacttacaagtggatcggcattggtgattacaccattcgtgcgtaaataaaaccgggtgatgcaaaagtagccatttgattcacaaggccattgacgcatcgcccggttagttttaaccttgtccaccgtgattcacgttcgtgaacatgtcctttcagggccgatatagctcagttggtagagcagcgcattcgtaatgcgaaggtcgtaggttcgactcctattatcggcaccattaaaatcaaattgttacgtaagatcttatcattctcccaccaaaaaattatcttaatgtaacagctggtgtaagtaaattctatcaacgaagatcaatcttatctactgaccaaaaaggcctgatagggcttcgctcactatacatccttggctgcaggtttagttgtacaccactcctaaatttaatgtgttggcaatgtgttcaataaagctcgaacaaattagctcattatgatcggttaatacttcaacttctggttgcatgattgtttgtccgtaaaaagataacgcgcctgccgggtagtagcaggcgcattacgcaataggtaaacaagggaggaagttcagaaatgtaaatcgggaaggttgtacgcaatgttcatcgtactacgttgttacggctttgccgcaacaagccagttgcctgccgcgctcgcagaatgtctgcagcccggagataaggagattgttcctgccagctaaatcccttcctgtcgatacgaaccagctcgtatttttctaccagaaaattcacggcatcggctagggtgataccggcatcgatagtctgtatcaggaatgttcgggttaaatatcagcaaaaagcccgcatcatgaatactggatatgaagcatgagagttacctcagtgtttatataaggattcggtccccctctctggaacggtaactctcaatctgatcggttcctgcgttagttcacatcacgactcattttttcgctctcaccggcatcccatttgccacaaaatatcccgccgtgctcctcggcagcgcttcctgtccacgaatcatatccgctattttctcgccaatcataattgtcgtggcgttcaaattcccggtgataatctgcggcataatgctcgcatccaccacacgcaggccttctaacccgtgtacgcggccttcgccgtcaaccacggacatctcgtcgtaacccattttgcaggtaccgcacggatggaaggcggtttcggcgtggttacgcacgaactcatcgagctgttcatccgtctggcattcgacaccggggctgatttcgcggccacgatactgatccagcgcgggttgatgcatgatctcgcgggtgatgcgaattgcgtcgcggaactcctgccagtcctgctcgtggctcatgtagttaaacagaatcgccggatgctggtgcgggtcgcgggatttaatccgcacatgcccacggcttgggctgcgcatactgccgacgtggcactggaaaccgtgctctttcactgcattgctgccgttatagttaatcgctactggcaggaaatggtactgaatattcggccacgcaaattcctcacggctgcgaataaatccacctgcttcaaagtggttgctggcaccaacgccagtgccgccaaacagccactccgcaccgattttcggctggttccaccactgcagggcagggtagagggaaaccggttctttgcactcatattgcagatacatctccagatgatcctgaagattttcgccgacgccgggtaattcatgcaccagcggaatatcaaactccgccagcagttcagcgttgccgacgccggagcgttgcaggatctgcggactggcaatcgcgcctgcacataacagcacttctttgttggccgttgcgcgggttgggatggtgctgtcgccttccagccattcgacgcccaccgcgcgtttgccgtcaaaaatgatgtgatcggtcatagcgtgagtacgaatggtcaggttaggacggcttttggcctgatcgagatagccacgcgcggtgctggcgcgacggccctgcggcgtgacggtgcgatccatcggaccaaaaccttcctgctgataaccgttgagatcgtccgtgcgcgggtagcccgcctgcacgcccgcttcaatcatcgcttcaaacagcggattgacgccgggtttggaggtagtgacgctcaccgggccatcaccgccgtgatagtcgttttcacccatatcgcgagtctcggccttgcggtagtagggcaggcagtcgaggtagctccagttctccagaccgggttcttgcgcccagttatcgagatccagcgcattgccacggatgtagcacatgccgttgatcaggctgcttccacccagacctttaccgcgtccgcactccatgcggcggttattcataaacggttcaggttccgtttcataggcccagttgtagcgtttaccctgtagcgggaatgccagggcagcgggcatctgggtgcggaagtcaaagcgatagtccgggccgcccgcttcaagcagcagcacggaggtattcggatcttcagtcagacgggtagcgagaacgttgccggcactgccggcaccaataatgatgtagtcaaattgcaaataaacctcctggttagaatatggactggaatttagccatctcaacctggatggacttcacctgggtgtaactctggagcgtcatcacgccgttctcgcgaccaatgccggagtgtttgtagccgccaacgggcatctctgccggggattcgccccaggtgttgatccagcaaatacccgcttccagctgatgaatgacgcgatgcgcgcggttcaggtccgctgtcacgatgcccgccgccaggccgtagtcggtatcgttagcgcggcgaatgacttcgtcttcgctctcgtaggtcagaatggacatcactggcccgaagatctcttcacgcacgatggtcatatcgtcgctgcaatcggtgaacactgtcggtgcaacccatgcgccgttatcgaagccatcgcctttcagtacatcgccgccgcacagtacgcgcgcgccttcctctttgcctttggcgatatagcgcagcacgttatcgcgatgcgggaagctgaccagcgggccgaagttagtttgcggatcgaaaacgtcgcccgcgcgaatgcgctcaacgcgcgccagaattttctgctcaaatgcggctttgcatttcgccggaacgaagacgcgggtgccattggtacacacctgaccggagctgaagaagtttgccatcatggcgatatcggcggcgagatcgagatccgcatcatcgaaaacgatcagcggacttttaccgcccagttccatggtcacttctttcagggaagaggccgcgctgttagccatcacttttttgccgctggcgacaccgccggtaaaactcactttggcaatgcccggatgctcggtcagatattgcccggtctccgcgcccacgcccggcaacacgttaaatacgccgtccggcaggcccgcttcgctgtaaatttcagccagctttaacgcggtaagcggggtaacttcgctcggtttgaaaatcattgcgttgcctgccgccagcgccggggcggatttccacagggcaatctggatcgggtagttccatgcgccaatccctgccactacgcccagcggttcgcggcgggtatacacaaaggacgtttcacgcaacgggatctggctgccttccagcgccgggatcagcccggcgtagtactccagcacgtccgcaccggtaacgatatcgacggtactggtttcgctatatgcttttccggtgtcgagggtttccagttttgcgagttcgtcattgcgttcacgcagaatatcaacggcccgacgcagaatacggctgcgctccatggcggtcatgctcgcccagattttttgcccctgctgggcgcttttcacggcgcgatcgacatcctcgcgcccggcggcctgcacggtcgccagcacgttaccgttggccgggttaatggtctcgaaggtgcgaccgctggtggcggaggtataaccaccatgtatataaagctgctgttctgccattcgggacatcacgtctcctcggttaatcggtgggtagatgctgagtgataaagtggcgggtcagggaattagcgcgggttttatccagcggtttgccgctcagagccgcgcgcagccataatccatcaatcagcgcggccaggccgtagcccgcttcctgtgcctgttcgcgcggcaattcgcgacgaaactcgctcaccagattgctcagcaagcggcggctgctgacctgctgtaaacgatagagcatcggctgatgcatactgctggcccagaacgccagccaggctttcatcgccgcactgctcacctgcgtttcatcgaagtttccgccaacaatcgcctgtaatcgctgctctgcactgccctgcggaagtgcatgtaatcgattcaaaaccgcgtcacgcagctgactggtgatatcgcgcatggttgcttccagcagaccatttttgtccctgaaatagtggctgatgatccccgtagaaacgcctgcacggcgggcgatctgcgcgatcgttgcatcgtgcatgcccacttcatttattgcttccagtgtggcgtcgatcagttgtctgcgccggatgctctgcatccccaatttgggcattttcgccactccattcatcagcggtgtttatctattaaagcggttattgattggacgttcaatataaaatgtgtcttaattgttacgaatttgattttaaatagtaacaataacagtggggatactggatgacagaccttagtcacagcagggaaaaggacaaaatcaatccggtggtgttttacacctccgccggactgattttgttgttttccctgacaacgatcctgtttcgcgacttcagcgccctgtggattggccgcacgctggactgggtttctaaaaccttcggttggtactatctgctggcggcaacgctctatattgtctttgtggtctgtatcgcttgtagccgttttggtagcgtgaagctcgggccagaacaatccaaaccggaattcagcctgctgagttgggcggcgatgctgtttgctgccgggatcggtatcgacctgatgttcttctccgtagccgaaccggtaacgcagtatatgcagccgccggaaggcgcgggacagacgattgaggccgcgcgtcaggcgatggtctggacgctgtttcactacggcttaaccggctggagcatgtatgcgctgatgggcatggcgctcggatactttagctatcgttataatttgccgctcaccatccgcagcgcgctgtacccgatcttcggtaaacggattaacgggccgataggtcacagtgtggatattgcagcggtgatcggcactatcttcggtattgccactacgctcggtatcggtgtggtgcagcttaactatggcttgagcgtactgtttgatattcccgatagcatggcggcgaaagcggcactgatcgccttgagcgtgataatcgccacgatctctgtcacctccggtgtcgataagggcattcgcgtgttaagcgagcttaatgtcgcgctggcgctgggattgatcctgttcgtattgtttatgggcgacactagcttcctgcttaatgcactggtgctgaatgttggcgactatgtgaatcgctttatgggcatgacgctcaacagttttgccttcgaccgtccggttgagtggatgaataactggacgctcttcttctgggcatggtgggtggcatggagcccgtttgtcggcttgttcctggcgcgtatcagccgtgggcgtaccattcgccagttcgtgctgggcacgttgattattccgtttaccttcacgctgttatggctcagcgtgttcggcaatagcgcgctgtatgaaatcatccacggcggcgcggcatttgccgaggaagcgatggtccatccggagcgcggcttctacagcctgctggcgcagtatccggcgtttacctttagcgcctccgtcgccaccattactggcctgctgttttatgtgaccagcgcggactccggggcgctggtgctggggaatttcaccagccagcttaaagatatcaacagcgacgcccccggctggctgcgcgtcttctggagcgtggcgattggcctgctgacgctcggcatgctgatgactaacgggatatccgcgctgcaaaacaccacggtgattatggggctgccgttcagctttgtgatcttcttcgtgatggcggggttgtataaatctctgaaggtagaagattaccgccgtgaaagtgccaaccgcgataccgcaccgcgaccgctggggcttcaggatcgcctgagctggaaaaaacgtctcagccgcctgatgaattatccgggcacgcgttacactaaacagatgatggagacggtctgttacccggcaatggaagaagtggcgcaggagttgcggttgcgcggcgcgtacgtggagctaaaaagcctgccaccggaagagggacagcagttgggtcatctggatttgttggtgcatatgggcgaagagcaaaactttgtctatcagatttggccgcagcaatatagcgtgccgggctttacctaccgcgcacgcagcggtaaaagcacctactaccggctggaaaccttcctgttagaaggcagccagggcaacgacctgatggactacagcaaagagcaggtgatcaccgatattcttgaccagtacgagcggcaccttaactttattcatctccatcgtgaagcgccgggccatagcgtgatgttcccggacgcgtgattgttattgcataaaaccgcgccatgtctgcatatggcgctgtttctcctacctcttgatacgttatatctatacggttaagcccttagtatctattgatgattaccagacaacagataataaaaaagaaaagaactattgcagcccaaaacctacatttgggctgttgcgaatgttcaataagtttagtcttatttaatgtaaatattgctgatcatttgaaatgacgcattattcatgagaaatgtgtatcgtaaatcaactgaaattaacgcaaccatttgttatttaaggtttaattatctgtgtgtgatattttattgaatgttttaaatattgtttttattggcattgctataatattggttatcatttgctgaatggattcagtcttaatgagtgggtttttaagggacaggcatagagtaatgatacgtatgcataaccaacatctttactcattatgtcattgaatgttgacgctatgtgtttatgagggagaggtattttcagttgatctggattgttaaattcatataatgcgcctttgctcatgaatggatgccagtatgtagtgggaaattataaatattgaaatagtccaactacttctttattaccaaaaatgagtatctgaattttaatattgcattcttgcgtgattatctcctgagtttgacttgtgattacctttttaaggtatttagcgtaactgtttttgagcgagcatcagaggtaaagataatcttcttgatagtgatgtgggatgttatacgtatggcatcgctgatgtttatggttaccccttatgtgtgctcaggaatcgacaggtaatcactcatactgaacagcgataaaagataaaggtgtgttcatgaatagttgtgattttcgtgtttttctgcaagagttcggtacaacggttcatttgagtttgcctggtagcgtatccgagaaagaacgactgctactcaagctgctgatgcagggaatgtctgtaacagaaataagtcagtacagaaatcgcagtgcaaagacaattagtcatcaaaagaaacagctctttgagaaactggggattcagagcgatattactttctggcgcgatattttctttcagtacaatccggagatcatatccgccacggggagtaatagtcacagatatattaatgataatcactatcaccatatcgtcacgcctgaagccatcagtctggcgttggaaaaccacgaattcaaaccgtggatccaaccggttttctgcgcgcagactggcgtactgacgggctgtgaggtgcttgtccgctgggaacatccacaaacgggaattatcccaccggatcagtttattcctctggcggagagttccggtcttattgtcataatgacccgccaactgatgaaacagactgcggatattctgatgccggtaaaacatttgctgccggacaatttccatattggcatcaacgtcagcgcgggttgttttttggcagcgggatttgaaaaagagtgtctgaacctggttaataaattaggtaacgataaaatcaagctggttctcgagctaacggaacgtaaccctattccggtaacgccagaagccagagcgatatttgacagccttcatcagcacaacattacctttgcgctggatgactttggtacgggttatgcgacctatcgttacttgcaggcgttcccggtcgattttattaagatcgataagagttttgtgcaaatggcgagtgtcgacgaaatctccggtcatattgtggacaatattgtcgaactagcgcgtaagcctggtctgagtatcgtggcggaaggggtagaaacccaggagcaggcggatttaatgatcggtaaaggcgttcactttttgcagggctatttgtactctccgccagtaccgggtaataaatttatctctgaatgggtaatgaaagcaggtggttgatgtaaaccgctattcacagcgcatcgggaggttggcagcgattaattctcccgatgcagtaaatcctgatagatccccgttaatatgccatttggcgcaaattgttttttaatccactgcgtcacctgacccgtagcagaatgctgagtcgccagtaacatgcggctatcctggcgcggattatggatttgtcgggtaaccagcagggattgcgtcatcgcctcacggaccatgtaatccggcaaaaaaccaattccttcacctaaaatctggcactgacatttggtgttgaaatctggcaccagaatactctcctgcccgtgcagcaaccagcccacttttttattaatcgtatgcgcggtgtcctccaccataatattagggtagagacgcagttggctttcggcgatgggttccggcacaaaggctaacgggtgatccggggcgatagcaaaagcccagcgaatcgcgccaatttcagtgtaatcaataccgccgccgtccagtagtgtatcgggtgcgccgatggcgatattggcctgattattaataatcgcatcccagacgccgttatacacttcggtggtgacggtaatctggcaggtaggaaactgctttttcagcacctgtaacaagcgtgcggtgtgtttgggcgtataaagcagctgattaatacaaatgcgcacacgcgcttctatgccctggctaatagtatcgattctgcgtttgatggcataaaaatcattcagcaggtcggtagctttgcggaaaaaataacgcccggactccgttaactcaatgctgcgggtactgcgagtgaacagcaccacatccagccccgtctccatacgcttaatggtgtagctaatggcggaagtggttaaacccaactcttctgcggctttactgaagctgccaaaacgcgcagcggtagtaaatgccaacagattctcttcggtaaaaatactgttcattaaaccattctcgccattatctactatgaatttctccagctatgactgtagaggtatcggttaaagatagataatcatttttgaataacttttaatacccgtcgcgtttagtcgtcgcttcgcttaatttttgtccaccatattcactaattacccccacgcagttacccgccagaaaacccagtaacgtcaccgtccagttcatcccgctggcaaaaaacagcgtcatgccgagaaagccaccgggaataaaggacagtaaccagaaacgcccttgccagaccactaccgcgctgaagggtacggtagtaattacgctcgcccagaacgcggacagtccacttacagaggccagccaaccagcagtcagcgcggcgaaaaacgcccacaccatcccggaataattaaccgccagacttctgataaacccgcttttaccgccgcctgcggcataaaaactgcaaaaggcgacgaagccaatggttcctaataattcccatccttgagagagcccgacatgactagacactaactgccaaagccctgcacaaataccgacggtgacacccgttgccgtgagtccgttcatcttgttcccctctggttagacatggacgaaagctactcttacatgtgcagactatagagaaataaaacctgattgagtgaaagggtatcgggtcaaagaaacaaatattgcactaccgcacactgcgaaaagattgttgaatattattcaacaaaaaggcgagatacggcgaattaaatttaagcgggttcttttatcagattatcgttgctattctcaattcatcgaaaacagccacaaaaaccaggggaatgtgaatgagtataaaaaatctacctgccgactatttattggctgcacaacagggtgatatcgataaagtaaaaacctgccttgcgctgggtgtcgatattaatacctgcgatcgtcaggggaaaacggcaattacgctggcaagtttatatcagcaatatgcttgcgttcaggcattaattgatgccggagcggatattaataagcaagattatacctgtttaaatccttttttaattagctgtctgaacgatgatttaacgctactacgaattattttaccggctaaacccgatcttaattgcgtaacccgttttggcggtgtcggcctgacgcctgcctgtgaaaaaggccatttaagtattgtaaaagagcttttggcgcatacggagattaacgttaaccagaccaaccatgtaggctggacgccgctactggaagcgattgtgcttaatgatggtggtattaaacagcaggcgattgtgcagttattgctggaacacggtgccagcccgcatctgaccgataaatatggcaaaacgccactggaactggcgcgggaacggggctttgaagagattgcgcagttactgattgccgcaggtgcataaaccgggaggcttgctatcaacacaccagaaagacggtgtgtgtgggcgctaactgcggatgcggattttctggcgcagcgggggcaaggacaggttgaacaggtctttgccagagcggtaaatatcgcactcccggctcgccagcagttgctgacgctgctttgtgaagagtacgacaatgcgccaaacagttgtcggttggcactcactcactttgatgatctgttccggcatggtgataaggttcagtttgacgatcaaggtattacggttggtcaacatcttcatatagagatgagtcgttgtcggcgttggctgtccccaaccttgcaaatgaccgctgtgaattttcaccttatcgcctggctacagtggcacgacattattcatcagcacctgggggaaaatgaaaccctgtttaattatcgcggcgataatccgttttatcaggcgttaaataaagaattacatattaaacgacgggcagttattcaggccgtaaacgataaacaaaatatcgccagtgcggtcgccagtatgatggggttagggattggccttacgccaagtgccgacgattatttaacaggtctggcgcttattttatttattcccgggcatccggcggaaaaatacaaagaggaattttatctcggtctgcaacgcggcaaaaataataccacattattaagtgccataacgctggaagccgcattacaacaacgctgccgggaaaatattcatcgttttattcacaacattatttatgacatccctgggaacgcaactcaggcaatagaaaaaattaaacatattggctccagttccggctgcgacatgctgtatggcatggccgatggttgtgcgctgagccaaacctacggagggaattatgtcagttaattaaccaaacctacggagggaattatgagtgttaaaatagtcattaaaccgaatacctattttgattctgtcagcctgatgtctatctccacgcgtgcaaataaactcgacggcgtcgagcaggcatttgtggcgatggcgaccgaaatgaataaaggcgtgctgaagaatttaggactgctgacgccggagctggagcaggcgaaaaacggcgacctgatgattgtcatcaatggtaaaagcggtgcggacaacgagcagttactggtggagattgaagaactgttcaacaccaaagcgcaaagcggcagccacgaggcgcgttacgccactattggcagcgccaaaaagcatatcccggaaagtaacctggcggtgattagcgtcaacggtctgtttgccgctcgcgaagcgcgtcaggcgctgcaaaacgatctcaacgtgatgctgttttccgataacgtcagtgttgaagatgaactggcgctcaagcaactggcccacgaaaaagggctgctgatgatggggccagactgtggcacggcgattatcaacggcgcggcgctctgttttggtaacgccgtgcgtcgcggcaacatcggtattgttggcgcatccggcaccggcagtcaggagttgagcgtccgcattcatgaatttggcggcggcgttagccaactgattggcaccggcgggcgcgacctgagcgagaaaatcggcggcctgatgatgctcgacgccatcgggatgctggaaaacgatccgcaaactgaaatcattgcgcttatctccaaaccgcctgcgcctgcggtggcccgcaaagtgctggaacgtgcgcgcgcctgccgcaagccggtggtcgtctgcttcctcgatcgtggcgaaacgccagtggatgagcaggggctacagtttgcccgcggcaccaaagaggcagcgctaaaagcggtgatgctctccggcgtgaaacaggaaaatctcgacctgcatacgcttaaccagccgttgattgcggatgtgcgtgcgcgtctgcaaccgcagcagaaatacattcgtggcctgttctgcggcggcacgctgtgcgacgaaaccatgttcgcggtgatggaaaaacatggcgatgtctacagcaacattcagcccgatccggaattccgcctgaaagatatcaaccgcagcatcaaacacaccttcctcgactttggcgatgacgacttcaccaatggcaagccgcacccgatgattgaccccaccaaccgcatcagtcgcttgatcgaagaggcgcgcgatccagaagtggcggtgatcgtgatggattttgtgctcggatttggaagccatgaagatccggtcggctccaccatcgagacgatcaaagaagcgaaagcgatcgccgctgccgaaggacgcgagttgatcattctcgcctatgtgctgggtaccgatcttgatacgccaagcttagaacaacaaagccagatgctgcttgatgccggagtgattctggcgagcagcagcaccaataccggattgctggcgcgtgaatttatctgcaaaggggaggaagcctgatgagccagagtctgtttagccaaccattgaacgttattaacgtcggcatcgccatgtttagcgatgacctgaaaaagcagcatgtagaagtgactcaactcgactggacgccgccggggcagggcaatatgcaggtggtgcaggcgctggataacattgccgatagcccgctggcggacaaaatcgccgccgctaaccagcaggcgctggagcgtattatccagagccatccggtgctgattggttttgatcaggcgattaacgtggtgccgggcatgacggcgaaaaccattcttcacgccgggccgccgatcacctgggaaaaaatgtgcggcgcgatgaaaggcgcggtcaccggagcgctggtgttcgaaggactggcgaaagatctcgacgaggcggctgaactggcggcttccggggagatcaccttcagcccgtgtcacgagcacgactgcgtgggaagcatggcgggtgttaccagcgccagcatgtttatgcacatcgtaaaaaacaaaacctacggcaacatcgcttataccaacatgagcgagcagatggcgaagattttgcgtatgggcgctaacgaccagagcgtgattgaccgcctgaactggatgcgtgatgtgcagggaccaatactgcgcgacgcgatgaaaattatcggcgaaatcgatctgcgcttaatgctggcgcaggcgctgcatatgggcgatgagtgccataaccgcaataacgccgggacgacactgctgattcaggcgctgacgccggggattattcaggcgggttattccgtcgagcaacagcgcgaagtgtttgagtttgtcgccagcagcgactacttctccggcccgacgtggatggcgatgtgtaaagcggcgatggatgcggcgcatggcatcgaatacagcaccgtggtcaccaccatggcgcgtaacggcgtcgagttcggcctgcgggtcagcggcctgccggggcaatggtttaccggcccggcgcagcaggtgatcggcccgatgtttgccggttataagccggaagatagcgggctggatatcggcgacagcgccatcaccgaaacctacggtattggcggatttgctatggcgaccgcgcccgctatcgtcgcgctggtgggcggcacggtggaagaagctattgatttctcccgtcagatgcgcgaaatcaccctcggtgaaaaccccaacgtcaccattccgctgctcggttttatgggcgtgccgagcgcaatcgacatcacccgcgtgggtagcagcggcattctgccggtgatcaacaccgccatcgcccataaagatgcgggcgtcggcatgattggcgcgggcattgtgcatccaccttttgcctgcttcgagaaagccattcttggctggtgcgaacgttacggcgtctgacctacatgttcatgccggatgcggcgtgaacgccttatccggcctacgaatggcgcaagaatctgtaggcctgataagcgtagcgcatcaggcatttgtcaccattgccggatgcggcgtgaacgccttatccggcctacgaatggcgcaagaatctgtaggcctgataagcgtagcgcatcaggcatttgccaccactgccggatgcggcgtggacgccttatccggcctacgagtggcgcgagaatctgtaggcctgataagcgtagcgcatcaggcatttgtcaccattgccggatgcggcgtgaacgccttatccggcctacgagtggcgcgagaattgtaagcctgataagcgtagcgcatcaggcagtctggcgttggtcataaccccatcaccctctgtagcggacataacaacatgaaagagcttgtggtcgttgccattggtggcaacagcattatcaaagataacgccagccagagcattgagcatcaggcggaggcggtgaaagccgtcgccgatacggtgctggaaatgctggcttccgattacgacattgtgctgacccacggcaacgggccgcaggtcgggctggatttacgccgtgcggagattgcccacaagcgcgaagggctgcccttaacgccgctggcgaactgtgtggcagatacgcagggcggcatcggctatctgatccaacaggcgctgaataaccggctggcgcgtcacggcgagaagaaagccgtcaccgtggtgactcaggtggaagtggataaaaacgatccaggttttgcccatcccaccaagcccatcggcgcattctttagtgacagccagcgtgacgaattacaaaaggcaaaccctgactggtgttttgttgaagatgccgggcggggctatcgccgcgtggtcgccagcccggaaccgaaacgtattgtcgaagcacctgccattaaagcgctgatccaacaaggttttgtcgtaattggcgcgggcggcggtggaattccggtagtgcgtactgacgcgggagattaccaaagcgtggacgcggttatcgacaaagatctctctaccgcgctgctggcccgtgaaattcacgccgacattcttgtgatcaccactggcgtcgaaaaagtgtgtattcactttggcaaaccgcagcagcaggcgctcgatcgggtggatattgccaccatgacccgctatatgcaggaagggcatttcccgcccggcagcatgttgccaaaaatcatcgccagcctgacatttttagaacaaggcggcaaagaagtgattatcaccacgccggaatgcctgcctgcggcgctgcgcggcgaaacgggcactcatattattaaaacgtaaggacgtaagatgaaagaaagcaatagccgccgtgaatttctgagccagagcggtaagatggtcaccgccgccgcgctgtttggtacctctgtgccgctcgcccatgcggcggtagctggcaccctaaactgcgaagcgaacaacaccatgaaaatcactgacccgcattactatctcgataacgtgctgctggaaaccggttttgactacgaaaatggcgtggcggtgcagacccgcacggcgcgccagaccgtggagattcaggacggcaaaattgtcgccctgcgcgagaacaagctgcatccggacgccacgctgccgcactatgacgctggcggtaagctgatgctgcccaccacccgcgacatgcatattcatctcgacaaaaccttttacggcgggccgtggcgcagcctcaatcgtccggcaggcaccaccatccaggacatgatcaaactcgagcagaaaatgctgccggaactgcaaccgtacactcaggagcgggcagaaaaactgattgatttattgcagagcaaaggcaccaccattgcccgcagccactgcaatatcgaaccggtttccggcctgaaaaatctgcaaaatttgcaggcggtgctggcgcgacgtcaggcgggctttgagtgtgaaatcgtcgccttcccgcagcacggtttgctgctgagcaaatctgaacctttaatgcgtgaagcgatgcaggcgggggcgcattacgtcggcggcctggacccgaccagtgttgatggcgcgatggaaaaatccctcgacaccatgttccagattgcgctggactacgacaaaggcgtcgatattcacctgcacgaaaccactccggcaggcgtggcagccatcaattatatggttgaaacggtagagaaaacgccacagctgaagggcaagctgaccatcagtcacgcctttgcgctggcaacgctcaacgagcaacaggtagatgaactggcgaaccggatggtggtgcaacaaatttctatcgccagcacggtgccgattggcacgctgcatatgccgctcaaacagttgcacgacaaaggcgtaaaagtgatgactggcactgacagcgttatcgaccactggagcccttatggtctgggcgacatgctggaaaaagccaatctgtacgcgcagctctatattcgtcctaacgaacagaacctctcccgcagcctgtttttagccactggcgatgtattgccgctgaatgaaaaaggcgagcgtgtatggccaaaagcgcaggatgacgccagctttgtgctggtggacgcctcctgttccgccgaggcggtggcgcgtatcagcccgagaaccgcaacgttccataaagggcaactggtgtgggggagtgtggcaggttgatgcgcatttgaaacgcctgcaacggtgaatagtaagagatttaagccccagggagtggggcaatctgaatatgagtgtgtcggcagaaatggacattatctttgaggaatatgcccttattgacgttgtgtagataactatttgtctacgtgaaaagatcatcagttttgccgattttagtcttttacagatagcaaatatcacacttacaggcgctcgccttatggggaacgttgctgctctgtttcattcaggctcgcggcatgttggggctggatcgggtggtttaaatattggctatattcaatggacgcgttttgccgcgatgacatatcaggcgttgccaaatacacatagctaatcaggagtaaacacaatgaagatcaaagctgttggtgcatattccgctaaacaaccacttgaaccgatggatatcacccggcgtgaaccgggaccgaatgatgtcaaaatcgaaatcgcttactgtggcgtttgccattccgatctccaccaggtccgttccgagtgggcggggacggtttacccctgcgtgccgggtcatgaaattgtggggcgtgtggtagccgttggtgatcaggtagaaaaatatgcgccgggcgatctggtcggtgtcggctgcattgtcgacagttgtaaacattgcgaagagtgtgaagacgggttggaaaactactgtgatcacatgaccggcacctataacagcccgacgccggacgaaccgggccatactctgggcggctacagtcaacagatcgtcgttcatgagcgatatgttctgcgtattcgtcacccgcaagagcagctggcggcggtggctcctttgttgtgtgcagggatcaccacgtatagcccgctacgtcactggcaggccgggccgggtaaaaaagtgggcgtggtcggcatcggcggtctgggacatatggggattaagctggcccacgcgatgggggcacatgtggtggcatttaccacttctgaggcaaaacgcgaagcggcaaaagccctgggggccgatgaagttgttaacagtcgcaatgccgatgagatggcggctcatctgaagagtttcgatttcattttgaatacagtagctgcgccacataatctcgacgattttaccaccttgctgaagcgtgatggcaccatgacgctggttggtgcgcctgcgacaccgcataaaagcccggaagttttcaacctgatcatgaaacgccgtgcgatagccggttctatgattggcggcattccagaaactcaggagatgctcgatttttgcgccgaacatggcatcgtggctgatatagagatgattcgggccgatcaaattaatgaagcctatgagcgaatgctgcgcggtgatgtgaaatatcgttttgttatcgataatcgcacactaacagactgaaaaaattaataaataccctgtggtttaacatattaacttcgctctccacttaactttttagttaaggagagcgaaataatatcaaagtagcagtaaaacctataacgtaaatttaaattgttaaattaacgccctccagtacacaatacttcacacgttagttatgagcgatttctgatagtgcctggtttaatcagagctttattatctgcgacgtttatttttatttaagagagatcgcgatgataagtttaaaagctccgcacaataatttgatgccatatacgcaacaaagcatacttaatacggttaaaaacaatcagttaccagaggatatcaaaagctccctggtttcctgtgtcgatatattcaaggttttgattaaacaatattatgattatccttatgattgtcgtgatgatttagtcgatgacgacaaactcattcatctcatggctgccgtacgagactgtgagtggagtgacgataacgcactcaccataaatgtgcagtttaatgatttccctggattttatgactggatggattaccctgatcacccggttaagtttgtttttcacatacttgaaaatcaaaaagggacagtttgggtatatgaccaggatgatgcgtttcttgatattaaagcaaacgtgcaggctggacgctttaccgggcttaagaaattagtgcagtttatcgatagtgtgcgaacagattgcaaatgtattcttcttgaataccatatgcctttgctgagaattttccctaaagggaaagagtgtatgcatgtggaaaaatggcttcgcgaaatgagctctattccggagacagacgcgcccattaagcaggcgcttgcgcatggattattattacacttaaaaaatatctaccctgtttttcctgaaagtctggtgatgttattgctctctgttctggacgtaaaaacatacagagatgatgcgcgattaaatgaatggatatctaatagagtgcaggaattaggtgacagatattatcctgtaaataagcacgttaaaatccgctacactctttaattcagaaagggttccacctgcaagttgttattccacctgagagtgaatcgcaatgcaggtaatcatttcatctgtatatctgtatgccaactggcattccatctcttttttcgccgatattttgttgtgatcggcgacacttcgcttaaaaaagcaccagtagtggtttcgcagccatgcggtgtataaaaaatgatctcatgcagatgttttgtgaatgtgttggttgacattcatatgaaaaaaatcataattccatcatgtttgtgtggggtcttttctgtatcttacgcatcgcactcaagcctgacagaaaatatgctgtaaggctcatatcaaaaaccgccattagctcatcaggaagagcagacgacaaccaggattgttgtatggtacggggttcgaggcctcgatggcggtccaacttttcaaaactcttctgaatcagatccccttattaagttccctgcaaagtggaacattgccattgtttggctatagtggatggggcagaccaatgaaaaaagcccacacaggggagagtgggctgaaatgggaggctaaagacagtagtaaacttatcggaaataaggaccacgcattacgggggctaagtagcccgatggccgtgattcggcaaatcaggttgattacgtaaagagtaaattatctgctcaccgctgcgtcaccccttcgtaaatcaggcgtagcgcgaatacaccaataattgcaccaataacccgactggcaacgcgttgcatacgcccataagcacgacgcacagcgggcaaagaaaacgcctgactaagaaaaactcgccagataatacttgcgagcacaatccccgcccaggccattaaacgtgcccatgttggtgtttctgcatttaatgttacactgaaaatactgataaaaaataaaacggtttgcgggttagagagatcggtaattaatccgcggcgaaaaaagacataccagggggcgctaatcggttgttgtagtgtgctcatttgcggtgtactctggcggcgcatgctgcaccacgcaaaccataagagataagcgccgccgacgattctgataaggctaaaaatctcctcacactgcgtaattagcgttgcaagaccaaacaaacccaacccggaataaaatgcatcgcccagcgccacgcccagcccggtcagcacccctgcgcgtcgaccggaagccaggctggtttgtactaccacaaagagattggctcccggattaaaaaaagtaatcacgaacagtcctacggtcaggtaaacggcatgcaaaggatccatagtgatttcatccataaataagtgaactaactgcatcatatttctaccaaaaataatcgggtgcgagagagatcacaaagtgtcttatttccggttactggcgtttatgccctgactgaactaattattaatcaacccaataatgtgggtgggtgatagtgtgataacaactctggagccgtaatatgaaaataatctctaaaatgttagtcggtgcgttagcgttagccgttaccaatgtctatgccgctgaattgatgaccaaagcggaatttgaaaaagttgaaagccagtatgaaaaaataggtgatattagtaccagcaatgaaatgagcactgcagatgcaaaagaagatttgatcaaaaaagcggatgaaaaaggggctgatgtgttggtactgacctccggtcaaactgacaataagatccacggcacggcaaatatttataagaagaagtaattctgaatcctatgtaaacatctccgatgcgtaagtttatcggtgatcatctattgaaatttatgccggataaagcgttcgcgctgcattcggcagttcagcttttcagccgccgccagaacgtcgtccggctgatgcctaaataattcgccgctgctgttttatcgccattaaatttctccagtgcctgttgtggtgtcagtaagcgtggagcgggagttttcgcgctctcgcgcgccagttccggcagtagcagttgcataaactgcggcgttaaatccggcgtcggttccacacttaaaaacagcgccagtcgttccatcatattgcgcagttcacgaatattgcctggccagtcgtagtgcagcagcacagtttcacttgcctgtaacccctggcgtaatgcagcagaaaatggggcggagagcgccgccagagacactttcaaaaagctttccgccagcggaagaatatccgccacccgctcgcgcagtggtggcaattgcagacgcaaaatactcagccgataaaacagatcacggcgaaaacgtccttgctgcatatcttcttccagattgcagtgagtggcgctaatgacccgtacatctaccggaacaggctgatgcccgccgacgcgggtgacctctttttcttccagcacccgcagcagccgggtctgcaaaggtagcggcatttcgccaatctcatccagaaacagcgtaccgccgtgggcaatttcgaacagcccggcgcgacctccgcgtcggctgccggtaaacgccccttcctcatagccaaacagttctgcttccagcaggctttcggcaatcgccccgcagttgacggcaacaaacggatggctctttttgccctgtcgcgcatcgtggcgggcaaaatattcccgatgaatcgcctgggccgccagctctttgcccgtccccgtttccccctcaatcaacaccgccgcactggagcgggcatacagcaaaatagtctgccgtacttgttccatctgtggactttgaccgagcatatcgcccagcacgtaacgagtacgcagggcgttgcgggtggcatcgtgagtgttatggcgtaagctcatgcgcgtcatatccagcgcatcgctgaacgcctggcgcacggtggcggcggaatagataaaaattccggtcattccggcttcttctgccaaatcggtaatcagccctgcgccgaccaccgcttcggtgccgttagcttttagctcgttaatctgcccgcgtgcgtcttcctcggtaatgtagctacgttggtcgaggcgcaaattaaaggttttttgaaacgccaccagcgctggaatggtttcctgataggtgacaacgccgatagaagaggtgagttttccggcttttgccagtgcctgtaacacatcgtagccgctcggtttaatcaaaataactggcacactcaggcggcttttcaggtacgcgccgttagagccagccgcgatgatggcgtcacagcgttcgtttgccagtttcttgcggatgtaggtcactgctttttcaaagccaagctgaataggggtaatgttcgccaggtgatcaaactcgaggctgatatcgcgaaacagctcgaacaggcgcgttacagataccgtccagataaccggtttgtcgtcattaagccgtggtggatgtgccatagcgcaccgcaaagttaagaaaccgaatattgggtttagtcttgtttcataattgttgcaatgaaacgcggtgaaacattgcctgaaacgttaactgaaacgcatatttgcggattagttcatgactttatctctaacaaattgaaattaaacatttaattttattaaggcaattgtggcacaccccttgctttgtctttatcaacgcaaataacaagttgataacaaaggatgggctatgtctctacactctccaggtaaagcgtttcgcgctgcactgactaaagaaaatccattgcagattgttggcaccatcaacgctaatcatgcgctgttggcgcagcgtgccggatatcaggcaatttatctttctggcggtggcgtggcggcaggtagcctggggctgcccgatctcggtatttctacccttgatgatgtgctgaccgacattcgccgtatcaccgacgtttgtagcctgccgctgctggtggatgcggatatcggttttggttctagcgcctttaacgtggcgcgcaccgtgaaaagcatgattaaagccggtgcggcaggattgcatattgaagatcaggttggtgcgaaacgctgcggtcatcgtccgaataaagcgatcgtcagcaaagaagagatggtggatcggatccgcgcggcggtggatgcgaaaaccgatcctgattttgtgatcatggcgcgcaccgatgctctggcggtagaggggctggatgcggcgatcgagcgtgcgcaggcctatgttgaagcgggtgccgagatgttgttcccggaggcgattaccgaactcgccatgtaccgccagtttgccgatgcggtgcaggtgccgatcctcgccaacatcaccgaatttggtgccacgccgctgtttaccaccgacgaattacgcagcgcccatgtcgcaatggcgctgtacccacttagtgcgttccgcgccatgaaccgcgccgctgaacatgtctacaacgtcctgcgccaggaaggcacgcagaaaagcgtcatcgacaccatgcagacccgcaacgagctgtacgaaagcatcaactactaccagtacgaagagaagctcgacaacctgtttgcccgtagccaggtgaaataaaaaacgcccgttgattgtattcgacagccgatgcctgatgcgtcgctgacgcgacttatcaggcctacgaggtgcactgaactgtaggtcggataagacggatggcgtcgcatccgacaaccgatgcctgatgcgccgctgacgtgacttatcaggcctacggggtgcactgaactgtaggtcggataagacgcatagcgtcgcatccgacaaccgatgcctgatgcgccgctgacgcgacttatcaggcctacggggtgcactgaactgtaggtcggataagacgcatagcgtcgcatccgacaaccgatgcctgatgcgccgctgacgcgacttatcaggcctacggggtgaactgaactgtaggtcggataagacgcatagcgtcgcatccgacaacaatctcgaccctacaaatgataacaatgacgaggacaacatgagcgacacaacgatcctgcaaaacagtacccatgtcattaaaccgaaaaaatctgtggcactttctggcgttccggcgggcaatacggcgctctgcaccgtgggtaaaagtggcaatgacctgcattaccgcggctacgatattcttgatctggcgaaacattgcgaatttgaagaagtggcgcatctgctgatccacggcaaactgccgacccgtgacgaactcgccgcttacaaaacgaaactgaaagccctgcgcggtttaccggctaacgtgcgtaccgtgctggaagccttaccggcggcgagccacccgatggatgttatgcgcaccggtgtttccgcgctcggctgcacgctgccagaaaaagaggggcataccgtctctggcgcgcgggatattgccgacaaactgctggcgagccttagcagcattctcctttattggtatcactacagccacaacggcgaacgcatccaaccggaaaccgatgacgactccatcggcggtcacttcctgcatctgctgcacggcgaaaagccaagccaaagctgggaaaaggcgatgcatatcagcctggtgctgtacgccgaacacgagtttaacgcctccacctttaccagtcgggtgattgcgggcaccggctctgatatgtattccgcgattattggcgcgattggcgcactgcgcgggccaaaacacggcggggcgaatgaagtgagcctggagatccagcaacgctacgaaacgccggacgaagccgaagcagatatccgcaagcgcgtggaaaacaaagaagtggtcattggttttggtcatccggtttacaccatcgctgacccgcgccaccaggtgattaaacgtgtggcgaagcagctcagccaggaaggcggcagcctgaagatgtacaacatcgccgatcgcctggaaacggtgatgtgggagagcaaaaagatgttccccaatctcgactggttctctgctgtttcctacaacatgatgggcgttcccaccgagatgttcacaccactgtttgttatcgcccgcgtcaccggctgggcggcgcacattatcgaacaacgtcaggacaacaaaattatccgtccttccgccaattatgttggaccggaagaccgcccgtttgtcgcgctggataagcgccagtaaacctctacgaataacaataaggaaacgtacccaatgagtgctcaaatcaacaacatccgcccggaatttgatcgtgaaatcgttgatatcgtcgattacgtcatgaactacgaaatcagctctaaagtggcctacgacaccgcacattactgcctgctcgacacgctcggctgcggtctggaagctctcgaatacccggcctgtaaaaaactgctggggccaattgttcccggcaccgtcgtacccaacggcgtgcgcgtccccggaactcagttccagctcgaccccgtccaggcggcatttaacatcggcgcgatgatccgctggctcgatttcaacgatacctggctggcggcggagtggggccatccttccgacaacctcggcggcattctggcaacggcggactggcttagccgcaacgcggtcgccagcggcaaagcgccgttgaccatgaaacaggtgctgaccgcaatgatcaaagcccatgaaattcagggctgcatcgcgctggaaaactcctttaaccgcgtcggcctcgaccacgttctgttagtgaaagtggcttccaccgccgtggtcgccgaaatgctcggcctgacccgcgaggaaattctcaacgccgttagcctggcgtgggtggacggtcagagcctgcgcacctatcgccatgcgccgaacaccggcacgcgtaaatcctgggcggcgggcgatgccacttcccgcgcggtacgtctggcactgatggcgaaaacgggcgaaatgggttacccgagtgccctgactgcgccggtgtggggcttctacgacgtctcctttaaaggtgaaagcttccgcttccagcgcccgtacggttcctacgttatggaaaatgtgctgttcaaaatctccttcccggcggagttccactcccagacggcagttgaagcagcgatgacgctctatgaacagatgcaggcagcaggcaaaacggcggcggatatcgaaaaagtgaccattcgcacccacgaagcctgtattcgcatcatcgacaaaaaagggccgctcaataacccggcagaccgcgatcactgcattcagtacatggtggcgatcccgctgctattcgggcgcttaacggcggcagattacgaggacaacgttgcgcaagataaacgcattgacgccctgcgcgagaagatcaattgctttgaagatccggcatttaccgctgactaccacgacccggaaaaacgcgccatcgccaatgccattacccttgagttcaccgacggcacacgatttgaagaagtggtggtggagtaccccattggtcatgctcgccgccgtcaggatggtattccgaaactggtcgataaattcaaaatcaatctcgcgcgccagttcccgactcgccaacagcagcgcattctggaggtttctctcgacagagctcgcctggaacagatgccggtcaatgagtatctcgacctgtacgtcatttaagtaaacggcggtaaggcgtaagttcaacaggagagcattatgtcttttagcgaattttatcagcgtagcattaacgaaccggagcagttctgggccgagcaggcccggcgtattgactggcagacgccctttacgcaaacgctcgatcacagcaatccgccgtttgcccgttggttttgtgaaggccgaaccaacttgtgccacaacgccatcgaccgctggctggagaaacagccagaggcgctggcgctgattgccgtctctagcgaaacagaagaagagcgcacctttacctttcgtcagctgcatgacgaagtgaacgcggtggccagtatgttgcgtagtttgggtgtgcagcgcggcgatcgggtgctggtgtatatgccgatgattgccgaagcgcatattactctgctggcctgcgcgcgcattggcgctattcacagcgtggtgtttggtggatttgccagccacagcgtggcggcgcgaattgatgacgctaaaccggtgctgattgtcagcgctgatgccggagcgcgcggtggcaaaatcattccctataaaaaattgctcgacgatgcgataagtcaggcgcagcaccagccacgccatgttttgctggtggatcgcgggctggcgaaaatggcgcgcgtcagcgggcgggatgtcgatttcgcgagcttgcgccatcaacacatcggcgcgcgggtaccggtggcgtggctggaatccaacgaaacctcctgcattctctacacttccggcacgaccggcaaacctaaaggcgtgcagcgtgacgtcggcggatatgcggtggcgctggcgaccagcatggacaccatttttggcggcaaagcgggcagcgtgttcttttgcgcaagcgatatcggctgggtggtggggcatagctatatcgtttacgcgccgctgctggcggggatggcgactatcgtttacgaaggattgccgacctggccggactgcggcgtgtggtggacaatcgtcgagaaatatcaggttagccggatgttcagtgcgccgaccgccattcgcgtgctgaaaaaattccctaccgctgaaattcgcaaacacgatctcagcagcctggaagtgctctatctggctggagaaccgctggacgagccgaccgccagttgggtgagcaatacgctggatgtgccggtcatcgacaactactggcagaccgaatccggctggccgattatggcgattgctcgcggtctggacgacaggccgacgcgtctgggaagccccggtgtgccgatgtatggctataacgtgcagttgcttaatgaagtcaccggcgaaccgtgtggcgtcaacgagaaagggatgctggtggtggaagggccgctgccgccggggtgtattcagaccatctggggcgacgacggccgctttgtgaagacttactggagcctgttttcccgcccggtgtacgccacctttgactggggcatccgtgacgctgacggttatcactttattctcgggcgcactgacgatgtaattaacgttgccgggcatcggctggggacgcgcgagattgaagagagtatctccagccatccgggcgttgccgaagtggcggtggttggggtgaaagatgcgctgaaagggcaggtggcggtggcgtttgtcattccgaaagagagcgacagtctggaagatcgtgatgtggcgcacagccaagagaaggcgattatggcgctggtggacagccagattggcaactttggccgcccggcgcacgtctggtttgtcagccaattgccaaaaacgcgatccggaaaaatgctgcgccgcacgatccaggcgatttgcgaaggacgcgatcctggagatctgacgaccattgatgatcctgcgagcttggatcagatccgccaggcgatggaagagtaagttattgtcggatgcgtcgcgcggtgcatccggcactgtgtgccgatgcctgatgcgacgctgacgcgttttatcatgcctacggacctgaaccgtaggtcggataaggcgctcgcgtcgcatccgacaccatgctcagatgcctgatgcgacgctgacgcgtcttatcaggcctacccactgtttttacaccgataatttttcccccacctttttgcactcattcatataaaaaatatatttccccacgaaaacgattgctttttatcttcagatgaatagaatgcggcggattttttgggtttcaaacagcaaaaagggggaatttcgtgagccaagataacaactttagccaggggccagtcccgcagagcgcgcggaaaggggtattggcattgacgttcgtcatgctgggattaaccttcttttccgccagtatgtggaccggcggcactctcggaaccggtcttagctatcatgatttcttcctcgcagttctcatcggtaatcttctcctcggtatttacactagttttctcggttacattggcgcaaaaaccggcctgaccactcatcttcttgctcgcttcagctttggtgttaaaggcagttggctgcctagtctgctactgggcggaactcaggttggctggtttggcgtcggtgtggcgatgtttgccattccggtgggtaaggcaaccgggctggatattaatttgctgattgccgtttccggtttactgatgaccgtcaccgtcttttttggcattagcgcgctgacggttcttagcgtgattgcggttccggctatcgcctgcctgggcggttattccgtgtggctggctgttaacggcatgggcggcctggacgcattaaaagcggtcgttcccgcacaaccgttagatttcaatgtcgcgctggcgctggttgtggggagttttatcagtgcgggtacgctcaccgctgactttgtccggtttggtcgcaatgccaaactggcggtgctggtggcgatggtggcctttttcctcggcaacagcttgatgtttattttcggtgcagcgggcgctgcggcactgggcatggcggatatctctgatgtgatgattgctcagggcctgctgctgcctgcgattgtggtgctggggctgaatatctggaccaccaacgataacgcactctatgcgagcggtttaggtttcgccaacattaccgggatgagcagcaaaacccttagcgtaatcaacggtattatcggtacggtctgcgcattatggctgtataacaattttgtcggctggttgaccttccttagcgcagctattcctccagtgggtggcgtgatcatcgccgactatctgatgaaccgtcgccgctatgagcactttgcgaccacgcgtatgatgagtgtcaattgggtggcgattctggcggtcgccttggggattgctgcaggccactggttaccgggaattgttccggtcaacgcggtattaggtggcgcgctgagctatctgatccttaacccgattttgaatcgtaaaacgacagcagcaatgacgcatgtggaggctaacagtgtcgaataactaagacgcatgtggaggctaacagtgagcaataacgctttacaaacaattattaacgcccggttaccaggcgaagaggggctgtggcagattcatctgcaggacggaaaaatcagcgccattgatgcgcaatccggcgtgatgcccataactgaaaacagcctggatgccgaacaaggtttagttataccgccgtttgtggagccacatattcacctggacaccacgcaaaccgccggacaaccgaactggaatcagtccggcacgctgtttgaaggcattgaacgctgggccgagcgcaaagcgttattaacccatgacgatgtgaaacaacgcgcatggcaaacgctgaaatggcagattgccaacggcattcagcatgtgcgtacccatgtcgatgttagcgatgcaacgctaactgcgctgaaagcaatgctggaagtgaagcaggaagtcgcgccgtggattgatctgcaaatcgtcgccttccctcaggaagggattttgagctatcccaacggtgaagcgttgctggaagaggcgttacgcttaggggcagatgtagtgggggcgattccgcattttgaatttacccgtgaatacggcgtggagagcctgcataaaaccttcgccctggcgcaaaaatacgaccgtctcatcgacgttcactgtgatgagatcgatgacgagcagagccgctttgtcgaaaccgttgctgccctggcgcaccatgaaggcatgggcgcgcgagtcaccgccagccacaccacggcaatgcactcctataacggggcgtataccagtcgcctgttccgcttgctgaaaatgtccggtattaactttgtcgccaacccgctggtcaatattcatctgcaaggacgtttcgatacgtatccaaaacgtcgcggcatcacgcgcgttaaagagatgctggagtccggcattaacgtctgctttggtcacgatgatgtcttcgatccgtggtatccgctgggaacggcgaatatgctgcaagtgctgcatatggggctgcatgtttgccagttgatgggctacgggcagattaacgatggcctgaatttaatcacccaccacagcgcaaggacgttgaatttgcaggattacggcattgccgccggaaacagcgccaacctgattatcctgccggctgaaaatgggtttgatgcgctgcgccgtcaggttccggtacgttatagcgtacgtggcggcaaggtgattgccagcacacaaccggcacaaaccaccgtatatctggagcagccagaagccatcgattacaaacgttgaacgactgggttacagcgagcttagtttatgccggatgcggcgtgaacgccttatccggcctacgtagagcactgaactcgtaggcctgataagcgtagcgcatcaggcaattccagccgctgatctgtgtcagcggctaccgtgattcattcccgccaacaaccgcgcattcctccaacgccatgtgcaaaaatgccttcgcagcggctgtctgccagctgtagtttatgccggatgcggcgtgaacgccttatccggcctacgtagagcactgaactcgtaggcctgataagcgtagcgcatcaggcaattccagccgcagacctgtgtcagcggttaccgactttcatttccgccaacaaccgcgcatttatccaacgccatgtgcaaaaatgccttcgcggcggctgtctgccagctatttttccgccgcaacaaaaccgccgttctctccagtagtggcggggcaagagaaatagctttaagcccgtcatgttgtgtggcaatcgctgctggtaacaatgtggaaagggaagtgcggcgaatcagctccagaaccgcgctaatactgttcgcctcaatgaccacctgtggatgtagccccgctttctcgcagtagtggtcaatttgctctctggtggcaaattccgcgctgagcaggaccagtttttcatcatgcaagcgactcaacgccacctgttcatggacggccagcggatgatgttgcgccacgactaacgctaaactttctgtcagtaaaggaattgcctccagctccgggctatgcacaggcgcgaaggcaatcccaacgtccaactcgtcgcggcaaagcatatcctcgattttctcctggctcatttcctgtagctggagcgtgatgctgggatagcgcgcatagaaatccgccattaaggggccgataaagtagctcgtaaaggtgggggtgacggcgatacgcaggcttcctcgcgtcagatcggcaacatcatgaatcgcccgtttacccgcccccagttcctgtaacgcccggctggcgtactgtcgccagacttctcctgcatcagtgagacgaatcgttcgcccgctacggtcaaacagcggcacgcctaaactctcctctaactggcgaatctgctgggaaagcgcaggttgggagacgtgcaacgcactggcggcacgggtgaagctgccatgttcagccacggcaagaaaataattgatatgtcgagagagcattcgcaacctataagtaaatccaatggaactcatcataaatgagacttttaccttatgacaatcggcgagtagtctgcctctcattccagagacagacagaggttaacggtgaaagagattattgatggattccttaaattccagcgcgaggcatttccgaagcgggaagccttgtttaaacagctggcgacacagcaaagcccgcgcacactttttatctcctgctccgacagccgtctggtccctgagctggtgacgcaacgtgagcctggcgatctgttcgttattcgcaacgcgggcaatatcgtcccttcctacgggccggaacccggtggcgtttctgctagcgtggagtatgccgtcgctgcgcttcgggtatctgacattgtgatttgtggtcattccaactgtggcgcgatgaccgccattgccagctgtcagtgcatggaccatatgcctgccgtctcccactggctgcgttatgccgatagtgcccgcgtcgttaatgaggcgcgcccgcattccgatttaccgagtaaagctgcggcgatggtacgtgaaaacgtcattgctcagttggctaatttgcaaactcatccaagcgtgcgcctggcgctcgaagaggggcggatcgccctgcacggctgggtctacgacattgaaagcggcagcatcgcagcttttgacggcgcaacccgccagtttgtgccactggccgctaatcctcgcgtttgtgccataccgctacgccaaccgaccgcagcgtaaccttatttttaaaccatcaggagttccaccatgattcagagtcaaattaaccgcaatattcgtcttgatcttgccgatgccattttgctcagcaaagctaaaaaagatctcagttttgccgagattgccgacggcaccggtctggcagaagcctttgtaaccgcggctttgctgggtcagcaggcgcttcctgccgacgccgcccgcctggtcggggcgaagctggatctcgacgaagactccattctactgttgcagatgattccactgcgtggctgcattgatgaccgtattccaactgacccaacgatgtatcgtttctatgaaatgttgcaggtgtacggtacaaccctgaaagcgttggttcatgagaaatttggcgatggcattattagcgcgattaacttcaaactcgacgttaagaaagtggcggacccggaaggtggcgaacgtgcggtcatcaccttagatggtaaacatctgccgaccaaaccgttctgacagccatgcgcaaccatcaaaagacgttcacgatgctgctggtactggtgctgattggtcttaatatgcgaccactgctcacctccgtcgggccactgctaccgcaattgcgccaggcgagcggaatgagctttagcgtggctgccctgttgaccgctctgccggtggttaccatgggcgggctggcgctggccggaagctggcttcatcagcatgtcagcgaacgtcgcagtgtcgccatcagtctgttgctgattgccgtcggtgcattgatgcgtgagctttacccgcaaagtgcgctgctgcttagcagcgcactgcttggtggggtggggatcggcatcattcaggcggtgatgcctagcgtgattaaacggcggtttcagcagcgcacgccactggtgatggggctgtggtccgcggctctgatgggcggcggtgggcttggtgccgccataacgccctggttagttcaacatagcgaaacctggtatcaaacactcgcctggtgggcgctgcctgccgttgttgcgctctttgcctggtggtggcaaagcgcccgcgaggtcgcctcttcccacaagacaacaaccactccggttcgcgtggtattcactccccgcgcgtggacgctgggtgtttacttcggtctgattaacggcggttacgccagcctgattgcctggttacccgctttctatattgagattggtgccagcgcgcagtacagcggttccttactggcattgatgacgcttgggcaagccgcaggagctttgctgatgcctgctatggctcgccatcaggatcggcgcaaactgttaatgctggcgctggtgttacaactggtggggttctgcggctttatctggctgccgatgcaattgccggtattgtgggcgatggtgtgtgggttaggtctgggcggcgcgtttccgctctgtttgctgctggcgctcgatcactctgtgcaaccggctattgctggcaagctggtggcgtttatgcagggaatcggttttatcatcgccgggcttgccccgtggttttctggcgtgctgcgtagtatcagcggcaattacctgatggactgggcatttcatgcgctgtgcgtcgttgggctgatgatcataaccctgcgttttgcaccagtacgttttccgcagctgtgggtcaaagaggcatgatgcgacgcttgttcctgcgctttgttcatgccggatgcggctaatgtagatcgctgaacttgtaggcctgataagcgcagcgtatcaggcaatttttataatttaaacactgctttcaactttataatctttgaaataatagtgcttatcccggtcgtttatttcgcgaataacccgacaaggaacgccagccgccacgacgtttggtggaatgtcttttgtgacgatactacccgcgccaataacagaattatccccgatggtgacgcctggattaataaccacatgacttccgatccagacgttattgccaatcgttatcggaaaagagtacatctcgccgttttttctcaattcatggtgtacagggtgtcccgtaacggaaagagtaacgttgggtgcaatcagtacgttatcaccgattgttaccgtgtagtcatcgacaatggttaaattgaaatttgcataaaaattgcggcctatatggatgttggaaccgtaagagaaatagacaggcggttctacccaggcgttttcccctaccgtggcaaacatttctttaatcaggctttctcttttttcaacttcacttggatggctgtgattaaactcatacattaacgttttcccacgaagtcttttttccggtaagccttcgcacatatcggtaaatagcttgcctgctcttattctttcggtcattggcatgttcaatgcgatcactccgttatgatatgttggtcggataaggcgctcgcgccgcatccgacattgattgcttaagcgacttcattcacctgacgacgcagcagggaaagcgggccggggccgctaagcgtgaacacggaaattaaggtgaagcccagcgccaccagacccagcaccagataagcgccctggaaaccgatgctttcatacatattgcccgccagtacagacataaaaatcatcgccagttgcttaaagaagcagaaacagaccagataaatcgtcgcactaaaacgcacttcaaactggctggtaatatatttaaagcagcccaccagcaggaacggtacttcaaacatatgcagcgttttcagaataaccacttccagcgcactggtggcgaagctactgccaataatacgtacagacataatagtgccagccagcagcagggcgtttttcccaccgatgcgattaatgatcagtggcgcaaagaacataatgctggcgttaagtaattcgcccattgtcgttacgtagccaaatacccgcgtaccctgttcaccggtagcaaagaagctagtaaagaaattagcaaactgttggtcaaaaacatcgtaggtgcaggaaacgccaataacatacagactcaaaaaccacagttttggctgtctgaacagttccagtgccagcttaaggctaaatgcgctatggttggcacctaccgcattggcaaccgtggcagaagagggcgcatccgttttggcgaaaaagagtaaaacggcgaggatgagtgcacagccagagcccagccagaaaacaaactgattattgatggtgaacatgatgccgacaatgctggcacacagcgcccagccaacacagccaaacatccgcgcgcgaccaaattcgaaattactgcgacggctgactttctcaataaatgcctctactgctggcgcaccggcgttaaaacaaaagcctagataaataccaccaacaatgcttcctactaaaatgttgtattgtaacagtggcccgaagataaaaataaagaacggcgcaaacatcactaacatgccggtaataatccacagcaggtatttgcgcagcccgagtttgtcagaaagcagaccaaacagcggttggaataataggctgaacagagaaatagcggcaaaaataatacccgtatcacttttgctgatatggttgatgtcatgtagccaaatcgggaaaaacgggaagtaggctcccatgataaaaaagtaaaagaaaaagaataaaccgaacatccaaaagtttgtgttttttaaatagtacataatggatttccttacgcgaaatacgggcagacatggcctgcccggttattattatttttgacaccagaccaactggtaatggtagcgaccggcgctcagctggaattccgcgcttacactcgggctccaggagtcgtcgccaccaatccccatatggaaaccgtcgatattcagccatgtgccttcttccgcgtgcagcagatggcgatggctggtttccatcagttgctgttgactgtagcggctgatgttgaactggaagtcgccgcgccactggtgtgggccataattcaattcgcgcgtcccgcagcgcagaccgttttcgctcgggaagacgtacggggtatacatgtcactcaatggcagatcccagcggtcaaaacaggcggcagtaaggcggtcgggatagttttcttgcggccctaatccgagccagtttacccgctctgctacctgcgccagctggcagttcaggccaatccgcgccggatgcggtgtatcgctcgccacttcaacatcaacggtaatcgccatttgaccactaccatcaatccggtaggttttccggctgataaataaggttttcccctgatgctgccacgcgtgagcggtcgtaatcagcaccgcatcagcaagtgtatctgccgtgcactgcaacaacgctgcttcggcctggtaatggcccgccgccttccagcgttcgacccaggcgttagggtcaatgcgggtcgcttcacttacgccaatgtcgttatccagcggtgcacgggtgaactgatcgcgcagcggcgtcagcagttgttttttatcgccaatccacatctgactaagaaagccactctggcggttaaattgccaacgcttattacccagctcgatgcaaaaatccatttcgctggtggtcagatgcgggatggcgtgggacgcggcggggagcgtcacactgaggttttccgccagacgccactgctgccaggcgctgatgtgcccggcttcactccatgcggtcgcgttcggttgcactacgcgtactgtgagccagagttgcccggcgctctccggctgcggtagttcaggcagttcaatcaactgtttaccttgtggagcgacatccagaggcacttcaccgcttgccagcggcttaccatccagcgccaccatccagtgcaggagctcgttatcgctatgacggaacaggtattcgctggtcacttcgatggtttgcccggataaacggaactggaaaaactgctgctggtgttttgcttccgtcagcgctggatgcggcgtgcggtcggcaaagaccagaccgttcatacagaactggcgatcgttcggcgtatcgccaaaatcaccgccgtaagcgctccacgggttgccgttttcatcatatttaatcaggctctgatccacccagtcccagacgaagccgccctgtaaacggggatactgacgaaacgcctgccagtatttagcgaaaccgccaagactgttacccatcgcgtgggcgtattcgcaaaggatcagcgggcgcgtctctccaggtaggctaagccattttttgatggaccatttcggcacagccgggaagggctggtcttcatccacgcgcgcgtacatcgggcaaataatatcggtggccgtggtgtcggctccgccgccttcatactgcaccgggcgggaaggatcgacagatttgatccagcgatacagcgcgtcgtgattagcgccgtggccactttcattccccaggctccagatgatcacactcgggtgattacgatcgcgctgcaccattcgcgttacgcgttcgctcatcgccggtagccagcgcggatcatcggtcagacgattcattggcaccatgccgtgggtttcaatattggcttcatccaccacatacaggccgtagcggtcgcacagcgtgtaccacagcggatggttcggataatggctacagcgcacggcgttaaagttgttctgcttcatcagcaggatatcctgcaccatcgtctgctcatccatgacctgaccatgcagaggatgatgctcgtgacggttaacgcctcgaatcagcaacggcttgccgttcagcagcagcagaccattttcaatccgcacctcgcggaaaccgacatcgcaggcttctgcttcaatcagcgtgccgtcggcggtgtgcagttcaaccaccgcacgatagagattcgggatttcggcgctccacagtttcgggttttcgacgttcagacgtagtgtgacgcgatcggcataaccaccacgctcatcgataatttcaccgccgaaaggcgcggtgccgctggcgacctgcgtttcaccctgccataaagaaactgttacccgtaggtagtcacgcaactcgccgcacatctgaacttcagcctccagtacagcgcggctgaaatcatcattaaagcgagtggcaacatggaaatcgctgatttgtgtagtcggtttatgcagcaagctgacgtcacggaaaatgccgctcatccgccacatatcctgatcttccagataactgccgtcactccagcgcagcaccatcaccgcgaggcggttttctccggcgcgtaaaaatgcgctcaggtcaaattcagacggcaaacgactgtcctggccgtaaccgacccagcgcccgttgcaccacagatgaaacgcgctgttaacgccatcaaaaataattcgcgtctggccttcctgtagccagctttcatcaacattaaatgtgaggctgtaacaacccgtcggattctccgtgggaacaaacggcggattgaccgtaatgggataggtcacgttggtgtagatgggcgcatcgtaaccgtgcatctgccagttactggggacgacgacagtatcggcctcaggaagatcgcactccagccagctttccggcaccgcttctggtgccggaaaccaggcaaagcgccattcgccattcaggctgcgcaactgttgggaagggcgatcggtgcgggcctcttcgctattacgccagctggcgaaagggggatgtgctgcaaggcgattaagttgggtaacgccagggttttcccagtcacgacgttgtaaaacgacggccagactatccgtaatcatggtcatagctgtttcctgtgtgaaattgttatccgctcacaattccacacaacatacgagccggaagcataaagtgtaaagcctggggtgcctaatgagtgagctaactcacattaattgcgttgcgctcactgcccgctttccagtcgggaaacctgtcgtgccagctgcattaaactatcggccaacgcgcggggagaggcggtttgcgtattgggcgccagggtggtttttcttttcaccagactgacgggcaacagctgattgcccttcaccgcctggccctgagagagttgcagcaagcggtccacgctggtttgccccagcaggcgaaaatcctgtttgatggtggttaacggcgggatataacaactgctgtcttcggtatcgtcgtatcccactacgctgatatccgcaccaacgcgcagcccggactcggtaatggcgcgcattgcgcccagcgccatctgatcgttggcaaccagcatcgcagtgggaacgatgccctcattcagcatttgcatggtttgttgaaaaccggacatggcactccagtcgccttcccgttccgctatcggctgaatttgattgcgagtgagatatttatgccagccagccagacgcagacgcgcgctgacagaacttaatgggcccgctaacagcgcgatttgctggtgacccaatgcgaccagatgctccacgcccagtcgcgtaccgtcttcatgggagaaaataatactgttgatgggtgtctggtcagagacatcaagaaataacgccggaacattagtgcaggcagcttccacagcaatggcatcctggtcatccagcggatagttaatgatcagcccactgacgcgttgcgcgagaagattgtgcaccgccgctttacaggcttcgacgccgcttcgttctaccatgctcaccaccacgctggcacccagttgatcggcgcgagatttaatcgccgcgacaatttggctcggcgcgtgcagggccagactggaggtggcaacgccaatcagcaagctctgtttgcccgccagttgttgtgccacgcggttgggaatgtaattcagctccgccatcgccgcttccactttttcccgcgttttcgcagaaacgtggctggcctggttcaccacgcgggaaacggtctgataagagacaccggcatactctgcgacatcgtataacgttactggtttcacattcaccaccctgaattgactctcttccgggcgctatcatgccataccgcgaaaggttttgcgccattcgatggtgtcaacgtaaatgcatgccgcttcgccttccggccaccagaatagcctggctttcaaccccttcttcgatctgttttgctacccgttgtagcgccggaagatgcttttccgctgcctgttcaatggtcattgcgctcgccatatacaccagattcagacagccaatcacccgttgttcactgcgcagcggtacggcgatagaggcgatcttctcctcctgatcccagccgcggtagttctgtccgtaaccctctttgcgcgcgcgcgccagaatggcttccagctttaacggttcccgtgccagttgatagtcatcaccggggcgggaggctaacatttcgattaattccttgcggtcttgttccgggcaaaaggccagccaggtcaggccgctggcggttttcagaagcggcaaacgtcgcccgaccattgcccggtgaaaggataagcggctgaaacggtgagtggtttcgcgtaccaccattgcatcaacatccagcgtggacacatctgtcggccataccacttcgcgcaacagatcgcccagcagtggggccgccagtgcagaaatccactgttcgtcacgaaatccttcgcttaattgccgcactttgatggtcagtcgaaaactatcatcggaggggctacggcggacatatccctcttcctgcagcgtctccagcagtcgccgcacagtggtgcgatgcaggccgctgagttccgccagcagcccgacgctggcaccgccatcaagtttatttaacatatttaataacattagaccgcgggttaagccgcgcacggttttgtattccgtctgctcattgttctgcatattaatactcatttctatagttaaaacaacgtggtgcacctggtgcacattcgggcatgttttgattgtagcgctaaacacccttcctatactgagcgcacaataaaaaatcatttacatgtttttaacaaaataagttgcgctgtactgtgcgcgcaacgacattttgtccgagtcgtgaggtactgaaatggcaatacaacaccctgacatccagcctgctgttaaccatagcgttcaggtggcgatcgctggtgccggcccggttgggctgatgatggcgaactatctcggccagatgggcattgacgtgctggtggtggagaaactcgataagttgatcgactacccgcgtgcgattggtattgatgacgaggcgctgcgcaccatgcagagcgtcggcctggtcgatgatgttctgccgcacactacgccgtggcacgcgatgcgttttctcaccccgaaaggccgctgttttgctgatattcagccaatgaccgatgaatttggctggccgcgccgtaacgcctttattcagccgcaggtcgatgcggtgatgctggaaggggtgagccgttttccgaatgtgcgctgcttgttttcccgcgagctggaggccttcagtcagcaagatgacgaagtgaccttgcacctgaaaacggcagaagggcagcgggaaatagtcaaagcccagtggctggtagcctgtgacggtggagcaagttttgtccgtcgcactctgaatgtgccgtttgaaggtaaaactgcgccaaatcagtggattgtggtagatatcgccaacgatccgttaagtacgccgcatatctatttgtgttgcgatccggtgcgcccgtatgtttctgccgcgctgcctcatgcggtacgtcgctttgaatttatggtgatgccgggagaaaccgaagagcagctgcgtgagccgcaaaatatgcgcaagctgttaagcaaagtgctgcctaatccggacaatgttgaattgattcgccagcgtgtctacacccacaacgcgcgactggcgcaacgtttccgtattgatcgcgtactgctggcgggcgatgccgcgcacatcatgccggtatggcaggggcagggctataacagtggtatgcgcgacgcctttaacctcgcatggaaactggcgttggttatccaggggaaagcccgcgatgcgctgctcgatacctatcaacaagaacgtcgcgatcacgccaaagcgatgattgacctgtccgtgacggcgggcaacgtgctggctccgccgaaacgctggcagggtacgttacgtgacggcgtttcctggctgttgaattatctgccgccagtaaaacgctacttcctcgaaatgcgcttcaagccgatgccgcaatattacggcggtgcgctgatgcgtgagggcgaagcgaagcactctccggtcggcaagatgtttattcagccgaaagtcacgctggaaaacggcgacgtgacgctgctcgataacgcgatcggcgcgaacttcgcggtaattggctggggatgcaatccactgtgggggatgagcgacgagcaaatccagcagtggcgcgcgttgggcacacgcttcattcaggtggtgccggaagtgcaaattcataccgcacaggataaccacgacggcgtactacgcgtgggcgatacgcaaggtcgcctgcgtagctggttcgcgcaacacaatgctagcctggtggtgatgcgcccggatcgctttgttgccgccaccgccattccgcaaaccctgggcaagaccctgaataaactggcgagcgtgatgacgctgacccgccctgatgccgacgtttctgtcgaaaaggtagcctgatatgcacgcttatcttcactgtctttcccacagcccgctggtggggtatgtcgacccggcgcaagaggtgctcgatgaggtcaatggcgtgattgccagcgcccgcgagcgtattgcggcattctcccctgaactggtggtgctgtttgcgccagatcactacaacggctttttctatgacgtgatgccaccgttctgtttaggcgttggagcgacggcaattggtgatttcggcagtgcggcaggagagctgcccgtgcctgtggagctggcggaggcctgtgcgcatgccgtcatgaagagcgggatcgatcttgccgtttcttactgtatgcaggtggaccacgggttcgcccagccgctggagttcctgctcggtgggctggataaggtgccagttctgcctgtgttcatcaacggtgtcgccacgccgctgcccggtttccagcgtacccgcatgttgggtgaagccattggacgtttcaccagcactctcaataaacgcgtgctgttcctgggttccggtgggctttcccatcagccgccggtgcccgaactggcgaaagccgatgcccatatgcgcgaccgtctgttggggagcgggaaagatttacccgccagtgagcgcgaattgcgtcagcaacgggtgattagcgccgctgagaagtttgttgaggatcagagaacgctgcatccgctcaacccgatttgggataaccagttcatgactttgctggagcagggacgcatacaggaactggatgccgtcagtaacgaagagctttccgccattgccggaaagagcacacatgaaatcaaaacctgggtcgccgcttttgccgctatttctgcgtttggcaactggcgtagcgaagggcgttattaccgcccaatcccggagtggattgccggatttggcagcttaagcgccagaacagagaactgaatatgcaggagaagatgatgagttatcagccacaaaccgaagccgccaccagccgttttctgaatgtagaagaagcgggtaaaacgctgcgcatccattttaatgactgcggacaaggcgacgaaaccgttgtcctgctgcatggttccggcccgggtgctactggctgggcgaacttcagccgcaatatcgatccgctggtagaggcgggctatcgggtgatcctgctggattgtccgggttggggcaagagcgatagcgtcgttaatagtggtagccgaagcgatcttaatgcacgaatcctgaaaagcgtggtggatcaactggatatcgccaaaatccacctgctgggcaacagcatggggggccatagttctgtggcgttcacccttaaatggccggagcgcgtcggcaaactggtgctgatgggcggcggtacgggcggcatgagtttgtttacgccgatgccaaccgaaggtattaagcgactgaatcagctttatcgtcagccgactatcgaaaacctgaagctgatgatggatatcttcgtttttgataccagcgatttgaccgacgccctgtttgaagcgcgcctgaataatatgctgagccgccgcgatcacctggaaaacttcgttaagagcctggaagctaatccgaaacagttcccggattttggcccacgtctggcggaaatcaaagcgcaaaccctgattgtctgggggcgcaacgaccgctttgtgccgatggatgcgggtctgcgtctgctgtccggcattgccggttctgaactgcatatcttccgcgactgtggtcactgggcgcagtgggaacatgccgacgctttcaatcaactggtgctgaatttcctcgcacgcccttaaggaatggtcatgacgaagcatactcttgagcaactggcggcggatttacgccgcgccgcagagcagggcgaagcgattgcaccgctgcgcgatctgattggtatcgataacgctgaagcggcttacgccattcagcacataaatgtgcaacatgacgttgcgcaggggcgtcgcgtggtagggcgtaaagtgggcctgacacatccgaaagtgcaacaacaactgggcgttgatcaaccggattttgggacgttatttgccgacatgtgttatggcgataacgaaatcattcctttttcccgtgttctgcaaccccgcattgaagcggagatcgcactggtgttgaaccgcgatttgcccgcaaccgatatcaccttcgacgaattgtataacgccattgaatgggtacttccggcgctggaagtggtggggagccgcattcgcgactggagcattcagtttgtcgataccgtggcagataacgcctcctgtggggtgtatgtcatcggcggtccggcgcaacgtccggcggggttagacctgaaaaactgcgccatgaagatgacgcgtaataacgaagaggtttctagcgggcgcggcagcgaatgcctgggacatccgcttaatgcggccgtctggctggcacgcaaaatggccagtctgggtgaaccgctgcgcaccggagatatcattcttaccggggcattaggtccgatggtggcggtgaatgcgggcgatcgttttgaagcccatattgaaggcataggtagtgttgctgcgacatttagtagcgcagccccaaaaggaagtctgagttgagctaagccccaaaaggaagtctgtcatgagtaagcgtaaagtcgccattatcggttctggcaacattggtaccgatctgatgattaaaattttgcgtcacggtcagcatctggagatggcggtgatggttggcattgatcctcagtccgacggtctggcgcgcgccagacgtatgggcgtcgccaccacccatgaaggggtgatcggactgatgaacatgcctgaatttgctgatatcgacattgtatttgatgcgaccagcgccggtgctcatgtgaaaaacgatgccgctttacgcgaagcgaaaccggatattcgcttaattgacctgacgcctgctgccatcggcccttactgcgtgccggtggttaacctcgaggcgaacgtcgatcaactgaacgtcaacatggtcacctgcggcggccaggccaccattccaatggtggcggcagttagtcgcgtggcgcgtgttcattacgccgaaattatcgcttctatcgccagtaaatctgccggacctggcacgcgtgccaatatcgatgaatttacggaaaccacttcccgagccattgaagtggtgggcggcgcggcaaaagggaaggcgattattgtgcttaacccagcagagccaccgttgatgatgcgtgacacggtgtatgtattgagcgacgaagctagtcaagatgatatcgaagccagtatcaatgaaatggctgaggcggtgcaggcttacgtaccgggttatcgcctgaaacagcgcgtgcagtttgaagttatcccgcaggataaaccggtcaatttaccgggcgtggggcaattctccggactgaaaacagcggtctggctggaagtcgaaggcgcagcgcattatctgcctgcctatgcgggcaacctcgacattatgacttccagtgcgctggcgacagcggaaaaaatggcccagagtctggcgcgcaaggcaggagaagcggcatgaacggtaaaaaactttatatcagcgacgtcacattgcgtgacggtatgcacgccattcgtcatcagtatagcctggaaaacgttcgccagattgccaaagcactggacgatgcccgcgtggatagcattgaagtggcccacggcgacggtttgcaaggttccagctttaactatggtttcggcgcacatagcgaccttgaatggattgaagcggcggcggatgtggtgaagcacgccaaaatcgcgacgttgttgctgccaggaatcggcactattcacgatctgaaaaatgcctggcaggctggcgcgcgggtggttcgtgtggcaacgcactgtaccgaagctgatgtttccgcccagcatattcagtatgcccgcgagctcggaatggacaccgttggttttctgatgatgagccatatgaccacgccggagaatctcgccaagcaggcaaagctgatggaaggctacggtgcgacctgtatttatgtggtggattctggcggtgcgatgaacatgagcgatatccgtgaccgtttccgcgccctgaaagcagagctgaaaccagaaacgcaaactggcatgcacgctcaccataacctgagtcttggcgtggcgaactctatcgcggcggtggaagagggctgcgaccgaatcgacgccagcctcgcgggaatgggcgcgggcgcaggtaacgcaccgctggaagtgtttattgccgccgcggataaactgggctggcagcatgggaccgatctctatgcgttaatggatgccgccgacgacctggtgcgtccgttgcaggatcgaccggtacgagtcgatcgcgaaacgctggcgctgggatacgctggtgtttacagcagcttcctgcgtcactgtgaaacggcggcggcgcgttatggcttaagtgcggtggatattctcgttgagctgggcaaacgccggatggttggcggccaggaggatatgatcgttgacgtggcgctggatctgcgcaacaacaaataatgatgactgccgagaacgtgcattttgtatgcccatcccagcacgactgccggatgcggcgtgaacgccttatccggcctacggatggcgtgagaatttgtaggtctgataagacgcgttagcgtcgcatcaggcatctgcgcacgactgccggatgcggcgtgaacgccttatccggcctacggatggcgcgggaatttgtaggcctgataagacgcgttagcgtcgcatcaggcatctgcgcacgactgccggatgcggcgtgaacgccttatccggcctacgggtggcgcgagaatttgtaggcctgataagacgcgttagcgtcgcatcaggcatctgcgcacgactgccggatgcggcgtaaacgccttatccggcctacggatggcgcgggaatttgtaggcctgataagacgcgttagcgtcgcatcaggcatctgcacacgactgccggatgcgataaacgtcttgtccggcctacatttcgcccgtaggcagtcattaaatagttctgattacgcggctggcaatgtatcagtcgcgattcacctgcactcgcaacgaggttcatcttatgagcactcgtacccctagtagttctagttcccgcctgatgctgaccatcgggctttgttttttggtcgctctgatggaagggctggatcttcaggcggctggcattgcggcgggtggcatcgcccaggctttcgcactcgataaaatgcaaatgggctggatatttagcgccggaatactcggtttgctacccggcgcgttggttggcggaatgctggcggaccgttatggtcgcaagcgcattttgattggcagtgttgcgctgtttggtttgttcagtctggcaacggcgattgcctgggatttccccagtctggtctttgcgcggctgatgaccggtgtcgggctgggggcggcgttgccgaatcttatcgccctgacgtctgaagccgcgggtccacgttttcgtgggacggcagtgagcctgatgtattgcggtgttcccattggcgcggcgctggcggcgacactgggtttcgcgggggcaaacttagcatggcaaacggtgttttgggtaggtggtgtggtgccgttgattctggtgccgctattaatgcgctggctgccggagagcgcggttttcgctggcgaaaaacagtctgcgccaccactgcgtgccttatttgcgccagaaacggcaaccgcgacgctgctgctgtggttgtgttatttcttcactctgctggtggtctacatgttgatcaactggctaccgctacttttggtggagcaaggattccagccaagccaggcggcaggggtgatgtttgccctgcaaatgggggcggcaagcgggacgttaatgttgggcgcattgatggataagctgcgtccagtaaccatgagcctactgatttatagcggcatgttagctagcctgctggcgcttggaacggtgagcagttttaacggtatgttgctggcgggatttgtcgcggggttgtttgcgacaggtgggcaaagcgttttgtatgccctggcaccgttgttttacagtagccagatccgcgcaacaggtgtgggaacagccgtggcggtagggcgtctgggggctatgagcggtccgttactggccgggaaaatgctggcattaggcactggcacggtcggcgtaatggccgcttctgcaccgggtattcttgttgctgggttggcggtgtttattttgatgagccggagaagtcgaatacagccgtgcgccgatgcctgacgtgccttattaggcaggggcgaaagggacttcaccccaatacacctacggcgtttacaggtatactcgctaaaaattattcagcgggtttggaaacaaagatggcaaaacttaccttacaagagcagttgctcaaagcaggattagtcaccagcaaaaaagcggcgaaggtggagagaacggcgaaaaaaagccgcgttcaggcgcgtgaagctcgggcggcggtagaagaaaataaaaaggcacagcttgagcgtgataaacagcttagcgaacagcaaaaacaagcggcgttggcgaaagaatataaagctcaggtgaagcagcttattgaaatgaaccgaatcaccattgccaatggcgatattggttttaacttcactgacggcaatctgattaagaagatttttgtcgataagctcacacaggcgcagttgattaatggtcgtctggcgattgcccgcttgttggtcgataacaatagcgaaggtgaatacgccattattcccgccagcgttgccgataaaattgctcagcgcgatgccagcagtatagtgttgcacagcgcgctcagcgccgaagagcaggatgaagacgacccgtatgccgacttcaaagtgcctgatgatttgatgtggtaaacatagataagtcgtgcgcagatgcctgatgcgacgctatgcgcgtcttatcaggcctacggtttatgggcgaagtgtagaccggataaggcgttcacgccgcatccggcagtcgtgcgccatgcctgatgcgacgctttgcgcgtcttatcaggcctacggcttacgggcgaagtgtaggccggataaggcgttcacgccgcatccggcagtcgtgctattatcaacgcatattcagtttattggcgtggtaggcaatatgctcgccaataaaactggagacaaaataatagctgtgatcataaccctcgtgataacggattaacgtcttgatattcatctcctggcagatcttttcaagatttggagtccgcagctgttctgcgtaaaaatcatcactcaacccctgatcaaccatgatttccgcaacgcgttgaccttgactaataagactcaccgggtcgtaatccaaccaggcatctttattttcagcaagatatgcagcaaaggcttgctgtccccacggcacttggcttggggagacaatggggctaaacgcgctgacgctgacatattcatctgggttacgtaacgccagcaccagcgcgcccagcccgcccatagaatgaccagagatagactttttggccgttgccggaaaatgatgcatcactaaatccggcagctcgttgcggatatagtcatacattttgtaatgttcattccacggcgcttgcgtcgcgttcaggtaaaacccggcaccttgcccgagatcgtaacggtcagcatctgcgacatgactgcctcgcggactggtgtccggcgcaacaacaataatgttgtgctcagccgcgtaacgctgcatcccgcttttagtaatgaaattctgctcgttgcaggtcaggccactaagccagtacagcaccggcaatttttcattcgcggcttttggtgggagatagacgccgacattcatttcacatttcagactttgggaataatgccgatacatattttgccagccgccaaagctgacatgtttttcaatgagttccatcagtcattatctcagggttaatcccccggacggctgcccggggagagtattaagaacccccgcctgaagtggacggggtaaacctgcgggaaatcagtaacgaattacggttcgaatggatttgccttcatgcatcaggtcgaaggcgtcattaatttcatccaggctcatggtatgcgtgacaaacggttccagatcgatatcacctttcatcgcatcttcaaccatgcccggtaactgggaacgacctttcacgccgccaaacgcggaacctttccatacgcgaccagtgaccaactggaatggacgggtggagatttcctgaccggcaaccgcgaccccgatgatcacgctctgaccccagccgcggtgcgcactttccagcgccgcacgcatcacgttgacgttaccgatgcattcaaaggtatggtcgataccccatttgttgatatccaacaggacatcttttatcggtttgtcgtagtcattcgggttaatgcagtcggtagcaccgaagcgacgcgccagatcgaatttcttcgggttggtatcgatagcgataatccgacccgctttcgcctgacgcgcgccctgaaccactgccagaccaatcgcgccaagaccaaacacggcaacagaatcacctggctggactttagctgtgttgtgtaccgcgccaataccggtggtcacgccacagcccagcaggcagacgtgttcatggtttgcttctggattaatttttgccagagacacttccgcgactacggtgtattcactgaatgtagagcaccccatgtagtgataaagcggctgcccgttgtaagaaaaacgggtggtgccgtctggcatcaggcctttaccctgggtttcgcgaaccgcaacacagaggttagttttgccagaacgacagaactcacactcgccgcactccgcggtgtaaagcgggatcacatggtcgccaggtttgacgctggttacgccttcaccgacttcaaccacaacgccggccccttcgtgaccgagaaccaccgggaatacaccttccgggtcatcgccggagagggtaaatgcgtcggtatggcaaacgccggtatgggtgactttaattagcacttcaccttttttcggtggtgcaacgtcaatttcaacgatttccagcggtttaccgggagcaaatgcaacggcagcacgacttttcatctctcgctcttcctcaatatggtaatagattcagttatttaagataggcacgaaccagttcaatagtgtcgtcaacggattggctgacttcgcggctgtagcagtcatttcggtcaaacgtttcccggatatggctttcaagcacttctgccatcagcccattagccgcgccccgaacggcagcgatctgttggagtatggcacggcattcggcatcaccctccaggctccgttccagagcatcaatctgcccccgaatacgacgaactcgagtaaggacctttttcttctcttccggagtactgggcatttcgcacctcatcatctgcatgcaatatactataggggggtattctatatgtcaatgcatacccccctatagtatataacactggagaataaaatttatccggtgaatgtggtcggaaaacaaagaggaaaggggggggggctaatcggcagggaaggccgccccggatagcgggcggcagaaggaatcagaatttccaggtcagacgggctgcaagttgcagaccgttacgagatggacggtcccctcgcccccttggggagagggttagggtgagggggcgttcaccgtactttcaacaggttaactccccctttctgagaggaaacaaaattaacgcagaatcttcttctcagccaaatccagcgcaaagtagctgaaaatcagatccgcacccgcacgcttaatgctacctaagctttcgagcacgactttctcttcatctatagcacccgccagcgcggcgaacttaatcatcgcatactcaccgctcacctgatacgcgccaatcggcaattcagtacgttcacgcagctcacgcacgatgtcgaggtacgctccagcaggtttaaccatcaggcagtctgcgccctgggcttcatccagcagactttcacgaatcgcctcacgacggttcattgggttcatctgatagcttttgcggtcgccttttaatgcgcttccggcagcttcacggaacgggccataaaaggaggaggcgaacttggtgctatagctcataatcgccgtatctttaaatcccgcagcgtccagcgcctgacgaatcgcctgtacctggccgtccatcgcggcggaaggggcgatgaagtctgcacctgcagcagctgcaaccacggcttgcttgcctaaattttccagagtcgcgtcgttgtcgacgccatgctcgcacagcacaccgcagtgaccgtgagaagtgtattcacagaagcaggtgtcactcataacgatcatttctggcacggtctgcttgcagatgcggctcatacgcgccaccagtccatcttcccgccaggcatcgctgccggtttcatcggtatggtgagagatgccaaaagtcatcacggaacgaataccggcgttggcgatgcgttcaatttcgcgtgccagatgtttctctggaatgcgcatcacgcctggcatggcttcaacggctttgtagtcgtcaatttcttcttcaacaaagatcggcaacaccaggtcgttaaggctaagtgttgtctcttcaaacatagcgcgcagcgcaggagatttgcgcaggcgacgagggcgttggattaagtctgtcatggtctgcctgatgtttgtggaatcgaggggcatagtatacctgaagcagggtagggatgttttacgaaagttgtcgcgatgttgacaagaagagaatggaagagaggccaggacatctttttaatagaaacagcaataattttatattcactgaaaatatttttaatcttgaatattatcgggcgttaaaatattacattgtggttttcaatgcgttatccgcagcgtgacgctccagcgccagttcaatcaaacgtgtgatcagatcggtgtaacccagaccgctggcttgccacagcttcggatacatactgatattagtgaagccaggcagggtgttgatctcgttgatcaccacttcgttctctggggttaaaaacacgtctacacgcgccatgcctgcgcatcccaacgtttgataagcctgaacggcaatcgcccggatcttatcgttgatttctggcgcaatggctgccggaactaccactttcgcgccatcttcgtcaatgtacttggtgtcgtaggcatagaaatcgctggtgagtacgatctctccacaggtgctggcttgcggattgtcgttgcccagaactgcgcattcgatctcacgacctttgatcccttgctcaacgatcactttatgatcgaactcgaacgccagatcgacggcaattgcgtactgttcttcactggttactttgctgacaccaacagaagagccctgattagccggttttacaaacagtggtaaccccagtttagactccacttcggcaaaactaatgttgtgacgattggcgcgcgtcagggtaataaatggcgcaatgttcagcccggcatcgcgtagcagacgtttggtgacatctttgtccatacaggctgcactagccagaacatcagaacctacaaacggtaaattggcgacccgcagcattccctgcaaggaaccatcttcgcccagcgtaccgtggacaatcgggaaaatgacatccaccgtcggcaacggctgaccgttttgcgcgtcgataagctgatgctcatgtttacctggcacctgcgcaaggctggtcgcgctagggcgcaacgcaatatgggcaggatcgtctgcatttagcagataattgctggcatcgctgacgtgccattgcccttgtttatcaatgcccagcagcacaacgtcgaagcgacttttatcaatggcatcgacaatgttttttgcgctttgcagagacacttcatgttccgcacttttaccaccaaaaacgattcctacccgcagtttttccatcttaaaaacctatcccgtctaacacaaagtgcatacattaccacgacaaaacgggggattcgcggccttctgaaagattgttgcaatcttctgctgacaaagcgtgcaacgtactggtgaagaaagtgcgttatctcaaagatgtgcgcaagatcacaaaaatgatgaacgggaagctaatttattcctggcttaaatggccatgcggtgagtttttttctcttaattataagttaacgaagagaatatatttcataacttttatttataataaaggttgataattaaaagcctatattttgtgtgggtaattatttaaataagagaaacgtttcgctggtaatcaaacaaaaaatatttgcgcaaagtatttcctttgtcataaaaataatacttccagacactatgaagttgtgaaacataatgttaacttctccatactttggataaggaaatacagacatgaaaaatctcattgctgagttgttatttaagcttgcccaaaaagaagaagagagcaaagaactgtgtgcgcaggtagaagctttggagattatcgtcactgcaatgcttcgcaatatggcgcaaaatgaccaacagcggttgattgatcaggtagagggggcgctgtacgaggtaaagcccgatgccagcattcctgacgacgatacggagctgctgcgcgattacgtaaagaagttattgaagcatcctcgtcagtaaaaagttaatcttttcaacagctgtcataaagttgtcacggccgagacttatagtcgctttgtttttattttttaatgtatttgtacatggagaaaataaagtgaaacaaagcactattgcactggcactcttaccgttactgtttacccctgtgacaaaagcccggacaccagaaatgcctgttctggaaaaccgggctgctcagggcgatattactgcacccggcggtgctcgccgtttaacgggtgatcagactgccgctctgcgtgattctcttagcgataaacctgcaaaaaatattattttgctgattggcgatgggatgggggacagcgaaattactgccgcacgtaattatgccgaaggtgcgggcggcttttttaaaggtatagatgccttaccgcttaccgggcaatacactcactatgcgctgaataaaaaaaccggcaaaccggactacgtcaccgacagcgctgcaagtgcaaccgcctggagtaccggtgtcaaaacctataacggcgcgctgggcgtcgatattcacgaaaaagatcacccaacgattctggaaatggcaaaagccgcaggtctggcgaccggtaacgtttctaccgcagagttgcaggatgccacgcccgctgcgctggtggcacatgtgaccagccgcaaatgctacggtccgagcgcgaccagtgaaaaatgtccgggtaacgctctggaaaaaggcggaaaaggaagcattaccgaacagctgcttaacgctcgtgccgacgttacgcttggcggcggcgcaaaaacctttgctgaaacggcaaccgctggtgaatggcagggaaaaacgctgcgtgaacaggcacaggcgcgtggttatcagttggtgagcgatgctgccagtctgaatagcgtgacggaagcgaatcagcaaaaacccctgcttggcctgtttgctgacggcaatatgccagtgcgctggctaggaccgaaagcaacgtaccatggcaatatcgataagcccgcagtcacctgtacgccaaatccgcaacgtaatgacagtgtaccaaccctggcgcagatgaccgacaaagccattgaattgttgagtaaaaatgagaaaggctttttcctgcaagttgaaggtgcgagtatcgataaacaggatcatgctgcgaatccttgtgggcaaattggcgagacggtcgatctcgatgaagccgtacaacgggcgctggaattcgctaaaaaggagggtaacacgctggtcatagtcaccgctgatcacgcccacgccagccagattgttgcgccggataccaaagctccgggcctcacccaggcgctaaataccaaagatggcgcagtgatggtgatgagttacgggaactccgaagaggatagtcaagaacataccggcagtcagttgcgtattgcggcgtatggcccgcatgccgccaatgttgttggactgaccgaccagaccgatctcttctacaccatgaaagccgctctggggctgaaataaaaccgcgcccggcagtgaattttcgctgccgggtggtttttttgctgttagcaaccagacttaatggcagatcacgggcgcatacgctcatggttaaaacatgaagagggatggtgctatgaaaataacattactggttaccttgcttttcggtctggtttttttaaccaccgtcggcgctgccgagagaactttaaccccacaacaacagcgtatgacctcctgtaatcagcaggcgacggcgcaggcgttgaaaggggatgctcgtaagacctacatgagtgattgcctgaagaacagcaagtctgcgcctggcgaaaaaagtttgacgccacagcagcaaaagatgcgcgaatgcaataatcaagcaacacaacaatctctgaaaggtgatgatcgtaataagtttatgagtgcctgcctcaagaaagccgcctgatacctgatagtgctaacgggtgagctacgaaaatggctcacccgaaatatcatacttctgcctttagctccgtctctataatttgggaaaattgtttctgaatgttcccaaaaataatgaatgatgaaaactttttcaaaaaagcggcggcgcacggggaggaacctcctttaactcctcaaaacgaacatcagcggtccgggctgcgcttcgcccgtcgcgtcagactaccccgtgcggttggcctggctggcatgttcttaccgattgctagtacgctggttagtcacccgccgccgggctggtggtggctggtgttggtcggctgggcgttcgtctggccgcatttagcctggcagatagcgagcagggccgtcgatccgcttagccgggaaatttacaacttaaaaaccgatgcagtattagcgggaatgtgggtaggcgtaatgggcgtaaacgtgctgccttccaccgcgatgttgatgattatgtgtctgaatttgatgggggcaggcggcccccgtctgtttgtcgcgggtctggtgttgatggtggtttcctgccttgtcaccctcgagctgacgggcattaccgtgagcttcaatagtgcgccgctggaatggtggctctcccttcccattattgtcatttatcctctgctgtttggctgggtcagctaccagacggcaaccaaactggcggaacataaacgcaggttgcaggtcatgagtacccgcgacggcatgacgggcgtgtataaccgacgtcattgggaaactatgttacgcaatgaatttgataactgtcggcggcataatcgcgatgcaacgttactgattatcgatatcgaccatttcaagagcatcaacgatacctggggccatgatgtgggcgatgaagcgattgtggcgcttacccgacagttacaaattgccctgcgcggtagcgatgtgattggtcggtttggcggcgatgagtttgcagtaatcatgtccggtacgccagctgagagcgccattaccgccatgttacgggtgcatgaagggctaaatacattacgtttgccgaatacgccacaggtaactttacggattagtgtgggggttgcgccgctgaacccacaaatgagtcactatcgtgagtggttgaaaagcgcagatttggcgctttacaaagcaaagaaagccggacgtaaccgcaccgaagtggcggcctgacgtccggcgaaagtcatcaggatttgctgagtttttcacttttttccatacacttcgtcatcgcttcgatcactgcagcacggaagcctttctcttccagtacgcgtaccgcttcaatggtggtgcctcccggactgcagaccatatctttcagtgcccccggatgttctcccgtttccagcaccatttttgcggaacccattaccgcctgagcggcaaatttatacgcctgggcgcgtggcatcccgcccagcacggcggcgtcggccatcgcttcgataaacataaatacgtaggctgggctagaaccgctcacaccgaccaccgggtggatcatcggctcagcaattacttccgcttcgccaaagcagcggaaaatattcagcacatcagcggtatcttctggggttaccagcgcgtttggcgttacggaggtcatcccggcattaaccagtgcgggagtgttcggcatggcgcggataattttccggtcatggcccagcgcgcgggcaagctggtcgagcgtgacacctgcagcaatagaaacgaccagagagtctttattcaggctggaggtgatttcgctaagcactttaatcatgatgccaggtttaacggcagcaaaaatgatgtcggcgatttgcgccacttcttgcgcgctttctgcggcgttgatgccgaactggtcatgcagggcggcgactttatccggggagggggtgtatacccagatttgccctggaagcacctgaccgctggcaatcagaccgccgagaatggcttttcccatattgccgcagccaataaaaccgattttcttttccattgcctcactcctgccgtgaaattcattgttttgataatcgctggcagaagcataaacagaactatgccggaaggcaaaagcgcgacacaatagaggattacccaacaaaggatgactttatgacaatttgggtggatgccgacgcgtgtcccaatgtaattaaagagattttgtatcgcgcggcggaacgtatgcagatgccgctggtactggtagcaaaccagagtttacgcgtgccgccaagccgatttattcgtacgctgcgcgtcgcggcaggtttcgacgttgccgataacgaaattgtccggcagtgtgaagcgggcgatttggtgatcaccgcagatatacctttggctgctgaagccatcgagaaaggcgctgcggcgcttaatccgcgcggcgaacgttacacgccagcgaccattcgtgagcgcctgacgatgcgcgattttatggataccttacgtgccagtgggatccagaccggcggaccagatagccttagtcaacgtgaccgccaggcctttgccgcggagctggagaagtggtggctggaagtgcaacgtagtcgtggctaaatgtaatttattatttacacttcattcttgaatatttattggtatagtaaggggtgtattgagattttcactttaagtggaattttttctttacaatcgaaattgtactagtttgatggtatgatcgctattctcatgacaccggctttcgccgcattgcgacctattggggaaaacccacgatgacacaacctctttttctgatcgggcctcggggctgtggtaaaacaacggtcggaatggcccttgccgatagccttaaccgtcggtttgtcgataccgatcagtggttgcaaagtcagctcaatatgacggtcgcggagatcgtcgaaagggaagagtgggcgggatttcgcgccagagaaacggcggcgctggaagcggtaactgcgccatccaccgttatcgctacaggcggcggcattattctgacggaatttaatcgtcacttcatgcaaaataacgggatcgtggtttatttgtgtgcgccagtaagtgtcctggttaaccgactgcaagctgcaccggaagaagatttacggccaaccttaacgggaaaaccgctgagcgaagaagttcaggaagtgctggaagaacgcgatgcgctatatcgcgaagttgcgcatattatcatcgacgcaacaaacgaacccagccaggtgatttctgaaattcgcagcgccctggcacagacgatcaattgttgattttcgagcgcctatacttaacgttcatcccgtgaaataaggaagaacgatgccaacgaaaccgccttatcctcgtgaagcatatatagtgacgattgaaaaaggaaagccaggacagacggtaacctggtaccaactcagagccgatcatcctaaaccagacagcttgatcagtgaacatccgaccgctcaggaagcgatggatgcgaaaaaacgctatgaggaccctgacaaagagtgaccgcatcagactgctcggaagggattctgagtgccactacaagggatctgcgtcacatttttcataattcatgtttttctaataattagaatattaaacaataacaatccattactggaatcatttggaatctttacattatgccgtgcacgtctgctgctacgctttttgtcatttgtagcacaagtaagtgtcagcagtggtgcttcacacttgcccggtaattaacgacgaaagaaaagtaaggtggatgaacaatgagtgcgagcttggcgatcctgaccatcggcattgtacctatgcaggaagttttgccgctcctgacggaatacattgacgaagataatatttcccatcatagcctgctggggaagttaagtcgtgaagaagtgatggcggagtacgcgccagaagcaggcgaagacaccattctcacattattaaatgacaaccagctggcccatgttagccgtcgcaaagtggagcgtgacctgcaaggtgtggttgaagtgctcgataatcagggttatgacgtcattttattaatgagtacagcaaacattagtagtatgactgcgcgtaatacgatctttcttgagccgagccgaatattgcctccactggtttcctctattgttgaagatcatcaggtgggggttatcgttccggttgaggagatgctgcccgttcaggcgcaaaaatggcaaattttgcagaaaagcccggtatttagtttgggtaaccccattcatgatagtgaacaaaaaatcattgatgccgggaaagaattactggcaaaaggggctgatgtcatcatgctggattgtttaggatttcaccaacgtcatcgcgatttactgcaaaaacagctcgatgttcctgtcttgctgtctaacgtattgattgcacggctggctgcggaattactggtgtaattttgcgtgacagccagcgcctctggcccctatagtgaagtagatgttcaactaccaaacagggccagtttatgcttcaaagtaatgagtacttttccggcaaagtgaaaagtatcggcttttccagcagcagcactggtcgcgccagcgtgggtgttatggttgaaggcgaatacaccttcagcaccgctgagccggaagagatgacggtaatcagtggcgcgctgaatgtgttactgcctgacgcgaccgactggcaggtgtatgaagccggtagcgtgtttaatgttcccggtcacagtgagtttcatctgcaagttgccgaacccacctcttatctgtgccgctatctgtaattcctcgccttccccttgaacgggagggcatttttctgaaatatcctttctttagcccataataatatttcctttgctgcgattttttcaatttccgatatattcataatttatcaaggttgatataaatatcagtgaagatctccagatattgttgcggaactggctacgataaaagataaatcagatgatgaatggtggcgtgcattgctgcaaagtcgcaatgatcatttacgccaaacggcattgcgcaacgcacataccccggcgttgttgttaacgacattgactgagcctcaggatcggagcctggctattaataatccacagctggctgccgatgtgaaaacggcgtggttaaaagaggatccaagtttactcttatttgtcgaacaacccgatcttagcctgttacgtgatttagtgaaaaccggggcaacgcggaaaattcgcagtgaagcgcgtcaccggcttgaggaaaaacaatgacacaacgtccatggagcaagttacagcgtaaaacgcataatattgctgcgctaaaaattattgctcgccgtagcgaataattatatgcctggtgtggcttcgtacgccggataagacgcggcaggcgtcgcatccggcattaaaggaaaatcagcaattaacgttgtgcttcgccacctaatccttcaatcaggttttgaattaacgctgccagttcaccagtcatcaggatgaaatcggcatcaaaacgctgggcgaaatcttcacggtcgatatcttcgttttgatcgcgcagctcgtcgcagaacttcagacgcttgaggctaccatcgtcgcacatcacaaactgaatgcgctgctgccagtcgagcgccagtttagtcaccacttttccggcttcaatgtgattggtgatctcttcgctggtcagatcttgtttcttcgcgcggatcacgccgccatcttccagcaagcttttcagctcggcttcatcaagcagctggaagccctgtgccgcactaccggagcgaacccattcggtcagcgtcagttcaatcgggttttccatgctcaatggtacaaccggtaagctccccaggcttttacgcagtaatgccagcgtatcttccgcttttttggcactggcgcagtccaccataatcaaaccgttaaccgtgtcgatccacatcattgtctggctaaaacggctgaaagcacgcggcagcagagagtgcagcacttcgtctttcaggctatctttttcggttttcttcagcttacgcgcctgttccgcttccagtttggcgattttcgcttccagcgcctgtttaatcaccggagacgggaggattttttcttctttgcgcgcgcagataacaatttgaccattggcaacgtgcgttaacgcatcgctgtggcttcccatcggaggaacccagcccatcttcgccatgtcctggctgccgcatggggtaaatgccatgctggctagctgtttttccatctcttctgcacgcaggctaatctcgcggctaagacggtaaaccattaaatttttgaaccacagcatgataatttccacggccttgtcgttaaatttagcgggcatgataacgaattgtcggcggccttgcattgccaatccggttgtccgtctctacgctattgatattgaaaaaaataaggagagtaccgtgcgtataggtatcgatttaggcggcaccaaaactgaagtgattgcactgggcgatgcaggggagcagttgtaccgccatcgtctgcccacgccgcgtgatgattaccggcagactattgaaacgatcgccacgttggttgatatggcggagcaggcgacggggcagcgcggaacggtaggtatgggcattcctggcagtattagcccttacaccggtgtggtgaagaatgccaatagtacctggctcaacggtcagccattcgataaagacttaagcgcgaggttgcagcgggaagtgcggctggcaaatgacgctaactgtctggcggttagtgaagcagtagatggcgcggcagcgggagcgcagacggtatttgccgtgattatcggcacgggatgcggcgcgggcgtggcattcaatgggcgggcgcatatcggcggcaatggcacggcaggtgagtggggacacaatccgctaccgtggatggacgaagacgaactgcgttatcgcgaggaagtcccttgttattgcggtaaacaaggttgtattgaaacctttattagcggcacgggattcgcgatggattatcgtcgtttgagcggacatgcgctgaaaggcagtgaaattatccgcctggttgaagaaagcgatccggtagcggaactggcattgcgtcgctacgagctgcggctggcaaaaagcctggcacatgtcgtgaatattctcgatccggatgtgattgtcctggggggcgggatgagcaatgtagaccgtttatatcaaacggttgggcagttgattaaacaatttgtcttcggcggcgaatgtgaaacgccggtgcgtaaggcgaagcacggtgattccagcggcgtacgcggcgctgcgtggttatggccacaagagtaaaaaacgtaggcaattggcgcatcatgcctgatgcgacgcttgccgcgtcttatcaggcctacaaaaggtgccagaaccgtaggccggataaggcgttcacgccgcatccggcaataagtgctccgatgcctgatgcgacgcttgccgcgtcttatcaggcctgcaaaatgtgccagaaccgcgtagggcggataaggcgttcacgccgcatccggcaataagtaatgagcaccgagactataacttaccccagtggtttcgccagcaccggagtatccgccgcttgctggcgcttatagcgaccatacagcagcaagctgctcatcgcagcaaagctaagcagggcggcaggcagcgccacgtaattatatgccagccccagcgtcagcatcatacctccgcaatatgcgccgacggcgctaccgaggttaaacgctatttgcccacctgcggcacctaataactctccgcctttggcgttttgtagtaacaatatttgtagcggtgcactaagggcaaataatcccgcgcaacaaataaaagcaaaaataaggctcgttgttttcatgccgccgcagaaaaagagcatcagcagtgccagtacaattataaagtcagttactgctgcaatgcgcagtggactataacgtccactaatcctgccacttagcatatttcccagcaccatccctagcccaactaacatcataataaaggtcatcgccgtttcgctaaaaccggaaataaacatcatgtatggctttacgtagctgaaccaggcaaacacacctgcgttgccaaacatcgtggcggcgaaaattaaccacggggccgggctgcgcaaaaagtgaaattgttcgcgcagatttcctttcgcctcgtcgcgaatatctggcacccaaaaatagacgcttgccatcaccgcaatattaaaaacagcgatcaataaaaaggtgtaacgccagctaaattcctgacttaaatacgttcccagcggaatgcccagcaaattggcgactgtcatcccggaaaccatccccgccacggcggcggtgacttttccgggtttgataattttacttaacacgatcgctccgacgccaaaaaatgcgccatgcggaaagccggataccagccgaccaatggcgagcatcaggtaagagctagagagcgtgaacatggcgttgccaatgacgcacaacgccaccagaaacaacaagatatgtttgagactgtagcggctggaaaagagtgcgatgattggcgcaccgaccaccacccccagtgcataatagctgatcatatgcccggcggcaggaatgctaattcctacgttatgcgccagctccgtgagcacgcccataatgccaaattcggccatccccaaaccaaacgtgcccagagccaaagataaaatgacttttttcataccaccatcacaaccaccagaacggctaccaatcaccgtagccaataaagtgatagcttgcaggataacgaccagcaaggccaagagataattcgcccctctgtattcattatcctgctgaatagttatttcactgcaaacgtactttccagtttgctgtagcccaggccgttgatctttttcactttgatctgcaccggaatacgctctttcatcgcttctacgtggctaatcacaccgatggttttgccactggcgttcagggcatccagcgcatcaagggcggtatccagcgtttcgctatccagcgtgccaaaaccttcatcaaggaacaggctgtcaatacgtgttttatggctgaccagatcgctaagcgccagcgccagcgccagactaacgaggaaactttcgccgccggaaagggtacgggtatcgcgtaccgcatctgcctgccaggtatcaacaacctcgacttccagcgcctcgctggctttgcgctgtaacagatagcgcccgtgcagccgggtaagttgctgattagcgagatggactaaattatccagcgtcagcccctgggcaaacttgcggaatttatcgccctctttggaacctattaggctattcagatatccccagtcctcaacctgctgcgtcatttgagcaatttgctgcattaaggtttgttgttgctgacggttatctgcatcctgcttcagctgctggcgaatctcgccttgactcgtggtgttttcacgcaacttttggtgagtttgcgctaactcttgctgaatctgctccaccgtcacagtgagagccaacccgtcgtcaggtcggtgttgttgatgctgtgccagcgtttctgctgtctgagtgaccagagtttgcgcctgacggcgctggttttccagattctgcttgagctgttccagctgcgttagtgtttgttcatccattagcgccgcaaggaacgcctgctgatcgtcaaagacgctggcctgtagcgcggtgtcaaactgcgcctgggctttttgcagactttgcgccgccagaacatcctgttgctgtaacgtctgctgctggctgtgtaatgcgagacattgttcatgtacctgccgccagttttccaataccacagtttcttcgcagtgcgggagttcatcactttgcggcaacgtttccagaatcggcgtcagctgctgaatacggttttgcagcgcggttaattcgttctggcgttgctgccagctctgcgcttcttgctgacgtgtcgccaaccagctctcttcttcatcttcctgtggcaatgtcagtgcataacccgtcaatgtcgttaaaagtagttgctggcgttgttcaatttgctgttgatactggataatttgctgattatgcgcggcaatctgcccttgtaattcatgccgttggctgagtaaccgcagctggcgttcgtgctcatcttgtgcatccagccacggttgaatatcgtccagtggctgcaaggtgatattgaggctggccgtgacggcttgccattgttgagtaagtgcttgctcatcttgtcggaggctttgcgcttcgttttcatcacgctgaagctgctttgttatggcgtccagttgcccacgtagcgtcgcaccttcttcaccgagctttttaacttcgttttccagcgccagtaatcgagactgattaacgccaggctccagcgcctgatacgcctcgaccgccgggtggctggtggaaccacaaagtgggcaaggctgacccgcctgtaactgtgcacgttgagcttccagcgttttgatgcgcgcttcctgctcgcaaatggttttcacatcggcaagttgctgcgtcttttctttataacgctggcgcatttcgttaagtgcggcgttacgttgcgtctgttcttgcgtgacattctggatagcgacctgtaactgcgccagacgtttttgttggggaacaatctgtccatgcagcgcgaccaggtgctgacgcagtgggcgttgctcagcatgttgcgccagggcggtagcaacttcatcggcggttaacgtcaacgtgatcgccgcaagcgcattaagtttttgctcagcatgggttaactgttgctgccattgccgcagatgctcgcgatcgctggtttgttgggagaactgcgcacgccaacccgccggttcgttgttccactgacggaagcggtcgtgttcctgtaaccaggtattcaggctttgttgctgctgctgtaattctgcactctgcttcgccgcgtggtggcgaatgctcgcgcgaagcgccattgtgctctgtaagcgagtatttacttcttcaatctgctggcgaatatgcgccagcgccgcgctgtgttctgcgatgcgttcccagtgtggacgaagatttcgtgccggttgtgccagactaagcgccgccagttgaggttgcgctttttcttcttcggctaacgcctgttgcaaggcctgctgacggcggctggcttcttgctgcaattcgtcctgacgcgttaaccagtttaggctttgttgttcttgctgctgcgcggtaattaactgtttttcttcgtcagtaagtacctgcaaactcgctgtcaggctttgcacttgttccggcgtgagcaacgtgacgccgctggcctgcgcttgcagcttctccagctctgtgcgggcgcttttgtgctgctcaaaaaccatcgcgctgatttgcccgtagatttcagtgccggttaactcctcgagcaattccgcgcgttctttgggtttggcattcaggaaggcagcaaattgcccctggctaagcagcatgctacgggtgaagcgcccgtaatccagcccggttaacgtcgctgtcagttccagcttatctttcactttgtcggcgagaattttgccgtcggcgcagcgcgccagctctacgcgtggcacctgcaaattaccgtcgggttggttacgcgcccgattctggctccagaatgcacggtacgcttcacctttcacttcaaactccacctccgccagacattcggcggtatcgcgggtcatgagatcattttggctttgactaacgttagagagacgcggagtttcgtgatacagcgccagacaaatggcgtccagcagggtggttttccccgcacctgttgggccggtaatagcaaacagcccgttgctggcgaacggctcgcgggtgaaatcaatcttccattcgccttttaaactgttcaggtttttcaggcgcaggctgagaattttcatgcttcgtgttctccggcgagggtatgcaacgtcgtggtgaaaagatgctgcagacgttgctgctggctttcatccagttcttccagtgccagacggcgattgaacacctcttcgacgctgagttcgctgagggtttcacgctgttggctggctaacacacgctcgcgctgttcacgactccgacgtaccagcaatacttcgacaggcaaactttcggttaatgcctggattttgcgctgaatatcatgcagatactcatcagtagtgatttcgatatccagccagacaggtggctcctggcttacatcgcgccactgttccagctgtgcggtaatgctcgccagatcgcctttcagcactgccatgggttgcgttaccggtacgttcaggttttccacgctctctaatttgccgttactaaatgtcaccagatggacatatttactcttaccgcattcatcaaaactcagtggaatgggggagccgcaatagcgaacatgttccatgccgccaataatctgtgcgcggtgaatatgcccgagcgcgatgtagtcggctggtggaaagttttgtgccggaaacgcgtccagcgtgccaatataaatgtcacgcacggcgtcacttttactggcccccacggtcgttaaatgtcccgtggcgatgatgggcagaggctgatcgccgcgcagtttgcaggcatcggcatagtgttgttggtaataatcggtaatcgctgccagtaaatgctgctgtttttcaataccgttaagccccgcctggctggtaataatgtcacgcggacgtaaaaacggaatggggcacagcactgcgcctggcgtcccgtcgcgacgaggcaagatttgcggcgcatgtccggcgctggcgaccacggtagtattgaggaacgccatgatatcgcggctttcattcagcgtggcgacgctgtcatggtttcctgccagtaccaccagatgacagccagtttgctgtaaattgacaacaaaacggttgtataacgtgcgggcgtaactgggcgggctgccggtatcgaaaacatcaccggcaacaataatcgcatccacctgatgggtttgtgctgtctccagcagccagtcaagaaaagcctgatgttcagcttcgcggcttttactgtagaagttctggccgagatgccagtcactggtgtgaaggatgcgcataacggttccctggcgaaaaagcatgggcgcgattatacccaaacagatgtgccatttgcttttttctgcgccacggaaatcaataacctgaagatatgtgcgacgagcttttcataaatctgtcataaatctgacgcataatgacgtcgcattaatgatcgcaacctatttattacaacagggcaaatcatggcgagacgtattctggtcgtagaagatgaagctccaattcgcgaaatggtctgcttcgtgctcgaacaaaatggctttcagccggtcgaagcggaagattatgacagtgctgtgaatcaactgaatgaaccctggccggatttaattctcctcgactggatgttacctggcggctccggtatccagttcatcaaacacctcaagcgcgagagcatgacccgggatattccagtggtgatgttgaccgccagaggggaagaagaagatcgcgtgcgcggccttgaaaccggcgcggatgactatatcaccaagccgtttagcccgaaggagctggtggcgcgaatcaaagcggtaatgcgccgtattagcccaatggcggtggaagaggtgattgagatgcagggattaagtctcgacccgacatctcaccgagtgatggcgggcgaagagccgctggagatggggccgacagaatttaaactgctgcacttttttatgacgcatcctgagcgcgtgtacagccgcgagcagctgttaaaccacgtctggggaactaacgtgtatgtggaagaccgcacggtcgatgtccacattcgtcgcctgcgtaaagcactggagcccggcgggcatgaccgcatggtgcagaccgtgcgcggtacaggatatcgttttagtacccgcttttaacgccttgctcatcggacgcagagcagggcttatgatttcttaactggagtatcttacgtgctggaacggctgagctggaaaaggctggtgctggagctgctactttgctgcctcccggctttcatcctgggtgcattttttggttacctgccctggtttttgctggcaagcgtaacaggactgcttatctggcatttctggaatttattgcgccttagttggtggctgtgggtggatcgcagtatgaccccgccaccggggcgtggtagctgggaaccgctactatacggcttacaccagatgcagctgcgaaataaaaaacgccgccgtgaactgggcaatctgattaaacgctttcgtagcggcgcggagagcctgcccgacgcggtggtgctgaccacggaagagggcggtattttctggtgtaacggtctggcgcaacaaattcttggtttgcgctggccggaagataacgggcagaacatccttaacctactgcgttacccggagtttacgcaatatctgaaaacgcgtgatttttctcgcccgctcaatctggtgctcaacaccgggcggcatctggaaattcgcgtcatgccttatacccacaaacagttgctgatggtggcgcgtgatgtcacgcaaatgcatcaactggaaggggcgcggcgtaacttttttgccaacgtgagccatgagttacgtacgccattgaccgtgttacagggttacctggagatgatgaatgagcagccgctggaaggcgcggtacgcgaaaaagcgttgcacaccatgcgcgagcagacccagcggatggaaggactggtgaagcaattgctgacgctgagcaaaatagaagccgcaccgacgcatttgctcaatgaaaaggttgatgtgccgatgatgctgcgcgttgttgagcgcgaggctcagactctgagtcagaaaaaacagacatttacctttgagatagataacggcctcaaggtgtctggcaacgaagatcagctacgcagtgcgattagcaacctggtctataacgccgtgaatcatacgccggaaggcacgcatatcaccgtacgctggcagcgagtgccgcacggtgccgaatttagcgttgaagataacggaccgggcattgcaccggagcatattccgcgcctgaccgagcgtttttatcgcgttgataaagcgcgttcccggcaaaccggcggtagcggattagggttagcgatcgtgaaacatgctgtgaatcatcacgaaagtcgcctgaatattgagagtacagtaggaaaaggaacacgtttcagttttgttatcccggaacgtttaattgccaaaaacagcgattaatccgcctttgtcatcttttattgccataagccagtcgatgctggcttattttctttgcagtcaaaatacgggcgttagattttacaacgattggtgattttttgttcgcatgattagccatgtctttttcacggaaatagtgttttatactggttggtgatttcttatcgctatatacctctggtttttagatccctccttgctttaaaacgttataagcgtttaaattgcgcttcaggtgctgtcatactgactgcattaacgcggtaaatcgaaaaactattcttcgccgcgcctggttgggagtatttcccgctaaaattgtttaaatataccgctgtatcatccccagggattggcacaaaaatttaacgttacaacaccacatccacaggcagtatgatttatgacccatcaattaagaagccgcgatatcatcgctctgggctttatgacatttgcgttgttcgtcggcgcaggtaacattattttccctccaatggtcggcttacaggcaggcgaacacgtctggactgcggcattcggcttcctcattactgccgttggcctgccggtattaacggtagtggcgctggcaaaagttggcggcggtgttgacagcctcagcacgccaatcggtaaagtcgctggcgtactgctggcaacggtttgttacctggcggtggggccgcttttcgctacgccgcgtacagctaccgtttcctttgaagtggggattgcgccgctgacgggtgattccgcgctgccgctgtttatctacagcctggtctatttcgctatcgttattctggttagcctctatccgggcaagctgctggataccgtgggcaacttccttgcgccgctgaaaattatcgcgctggtcatcctgtctgttgccgctattgtctggccggcgggttctatcagcacggcgactgaggcttatcaaaacgctgcgttttctaacggcttcgttaacggctatctgaccatggatacgctgggcgcaatggtgtttggtatcgttattgttaacgcggcgcgttctcgtggcgttaccgaagcgcgtctgctgacccgttataccgtctgggctggcctgatggcgggtgttggtctgactctgctgtacctggcgctgttccgtctggggagtgacagcgcgagcctggtcgatcagtctgcaaacggcgctgctattctgcatgcttacgttcagcacacctttggcggcggcggtagcttcctgctggcggcgttaatcttcatcgcctgcctggtaacggcagttggcctgacctgtgcttgtgcagaattctttgcccagtacgtaccgctctcttatcgtacgctggtgtttatcctcggcggcttcagcatggtggtttctaacctcggcttaagccagctgatccagatctccgtaccggtgctgaccgctatttatccgccgtgtatcgcactggttgtattaagttttacacgcagttggtggcataatagctcccgcgtgattgctccgccgatgtttatcagcctgctttttggtattctcgacgggatcaaagcatctgcattcagcgatatcttaccgtcctgggcgcagcgtttaccgctggccgaacaaggtctggcgtggttaatgccaacagtggtgatggtggttctggccattatctgggatcgcgcggcaggtcgtcaggtgacctccagcgctcactaaatcactgaacatttgttttaaccacggggctgcgatgccccgtggttttttattgtgttgatgggttaggaattgatggaaagtaagaacaagctaaagcgtgggctaagtacccgccacatacgctttatggcactgggtagtgcaattggcaccgggctgttttacggtagcgcagacgccatcaaaatggccggtccgagcgtgttgttggcctatattatcggtggtatcgcggcgtatatcattatgcgtgcgctgggggaaatgagcgtacataacccggccgccagctctttcagccgttatgcgcaggaaaacctcggcccgctggcaggttacattaccggctggacctactgctttgaaatccttattgtcgccatcgccgatgtgaccgcttttggtatctatatgggtgtctggttcccgacggtgccgcactggatttgggtactgagcgtggtgctgatcatttgcgccgtaaacctgatgagcgtgaaggtattcggtgagctggaattctggttcagcttctttaaagtcgccaccatcatcatcatgattgtcgccggtttcggcatcatcatctgggggattggcaacggcgggcaaccgaccggtattcataacctgtggagcaacggcggcttcttcagtaacggctggcttggcatggtaatgagcttgcaaatggtgatgtttgcttacggtgggatcgaaattatcgggattaccgccggtgaagcgaaagatcctgagaaaagcataccgcgtgcgattaactccgtgccgatgcgtattctggtgttctacgtcggtacgctgttcgtcattatgtctatctacccgtggaatcaggttggcactgccggtagcccgttcgtgctgacgttccagcatatgggcattacctttgccgccagcattcttaactttgttgtgctgactgctagcctgagcgcaattaacagtgatgtatttggcgtaggccgtatgctccacggtatggcagagcagggcagcgcgccgaaaattttcagcaaaacgagccgtcgcggtattccgtgggttacggtgctggtgatgactaccgcgctgctgtttgcggtgtatctgaactacatcatgccggaaaacgtcttcctggtgatcgctagcctggcaaccttcgccacggtgtgggtgtggattatgatcctgctgagccaaattgccttccgtcgccgtttgccgccagaagaagttaaggcgctgaaatttaaagtgccgggtggggtagcaacgaccatcggcgggctgattttcctgctctttattatcgggttgattggttatcacccggatacgcgtatcagcctgtatgtcggtttcgcgtggattgttgtgctgttgattggctggatgtttaaacgccgccacgatcgtcagctggctgaaaaccagtaatccttgcgttctgtaagccggttcaggaggaaatcctgatccggctattccgaaagttatccgcccccgtcctcctcccccaaatatccttcagatgatgagtgatcctgcattaggctatggcaaggtgatcagattttcatcacaggggaattatgatgttaaatgcatggcacctgccggtgcccccatttgttaaacaaagcaaagatcaactgctcattacactgtggctgacgggcgaagacccaccgcagcgcattatgctgcgtacagaacacgataacgaagaaatgagtgtaccgatgcataagcagcgcagtcagccgcagcctggcgtcaccgcatggcgtgcggcgattgatctctccagcggacaaccccggcggcgttacagtttcaaactgctgtggcacgatcgccagcgttggtttacaccgcagggcttcagccgaatgccgccggcacgactggagcagtttgccgtcgatgtaccggatatcggcccacaatgggctgcggatcagattttttatcagatcttccctgatcgttttgcgcgtagtcttcctcgtgaagctgaacaggatcatgtctattaccatcatgcagccggacaagagatcatcttgcgtgactgggatgaaccggtcacggcgcaggcgggcggaagtacgttctatggcggcgatctggacgggataagcgaaaaactgccgtatctgaaaaagcttggcgtgacagcgctgtatctcaatccggtgtttaaagctcccagcgtacataaatacgataccgaggattatcgccatgtcgatccgcagtttggcggtgatggggcgttgctgcgtttgcgacacaatacgcagcagctgggaatgcggctggtgctggacggcgtgtttaaccacagtggcgattcccatgcctggtttgacaggcataatcgtggcacgggtggtgcttgtcacaaccccgaaagcccctggcgcgactggtacagctttagtgatgatggcacggcgctcgactggcttggctatgccagcttgccgaagctggattatcagagcgaaagtctggtgaatgaaatttatcgcggggaagacagtattgtccgccactggctgaaagcgccgtggaatatggacggctggcggctggatgtggtgcatatgctgggggaggcgggtggggcgcgcaataatatgcagcacgttgccgggatcaccgaagcggcgaaagaaacccagccggaagcgtatattgtcggcgaacattttggcgatgcacggcaatggttacaggccgatgtggaagatgccgccatgaactatcgtggcttcacattcccgttgtggggatttcttgccaataccgatatctcttacgatccgcagcaaattgatgcccaaacctgtatggcctggatggataattaccgcgcagggctttctcatcaacaacaattacgtatgtttaatcagctcgacagccacgatactgcgcgatttaaaacgctgctcggtcgggatattgcgcgcctgccgctggcggtggtctggctgttcacctggcctggtgtaccgtgcatttattacggtgatgaagtaggactggatggcaaaaacgatccgttttgccgtaaaccgttcccctggcaggtggaaaagcaggatacggcgttattcgcgctgtaccagcgaatgattgcgctgcgtaagaaaagtcaggcgctacgtcatggcggctgtcaggtgctgtatgcggaagataacgtggtggtatttgtccgcgtgctgaatcagcaacgtgtactggtggcaatcaaccgtggcgaggcctgtgaagtggtgctacccgcgagtccgtttctcaatgccgtgcaatggcaatgcaaagaagggcatgggcaactgactgacgggattctggctttgcctgccattagcgctacggtatggatgaactaacgttttataacgccttgcgactcgcctgcgccatcatccgcggataaaactgccagaagcgggtttcgagggcgtcataatgagcgtctaaatcgtaccaggagtcacgcagggcatccagacgtgggcggcggcttgccatgccgtttaacacgttctggatgaaatccatatcgcgatagcgcaccagccactgctcactccacaagtaattgttcagattgataaaacgtggcggactgtccggcaaaatcgtcatcacttgctcgcgggcataacagacaaattcctgtagcggaaagtccgggctcagctggctccagtggcgggaaagaaagtgatcccacatgacatccagcgtaataggcgcaacgcggcgcgtttcactacgaaaccactcccgtgcttcgcggacttccggcagattgtcagtcaatacgtcgatacgtcgatgcatatgaatgccagccacgacgtcgggcggaaaactttcttcaggatttccgcgtacgaaatcagccagtaaattgccggaaaggctgctttccgcgagatgggctaaatgcaggtgagctaaaaaattcatcgattatattctatccaaaagggggtaaaggttgcagggagagcgccccggcactagactacccgcctcttattttagtctgagtcagtgtcatgcgcgttaccgatttctcctttgaattgcccgaatccctgattgcccactatcccatgcctgaacgcagtagctgtcgtttactgagcctggacgggccgacgggcgcgctgacgcacggtactttcaccgatttacttgataagctcaaccccggcgatcttctggtttttaataatacccgcgtgatcccggcgcgcctgtttgggcgtaaagccagcggcggcaagattgaagtgctggttgaacggatgctcgacgacaaacgcattcttgcgcatattcgcgccagcaaagcgccaaaacctggcgcagaactgctgctgggcgatgacgaaagtattaacgcaacaatgaccgcgcgccacggcgcactgtttgaagtcgaatttaatgatgaacgcagcgtgctggatattctcaacagcatcggccatatgccgctgccgccgtatatcgaccgtccggacgaagacgctgaccgcgaactttatcaaaccgtttatagcgaaaaaccgggcgcggttgcagccccgaccgcaggtctgcattttgacgagcctttgctggaaaaattgcgcgccaaaggcgtggagatggcgtttgtgacgttgcacgttggtgcgggcaccttccagccggtgcgcgtcgacaccattgaagatcacatcatgcacagcgaatacgctgaagtaccgcaggatgtggtagacgcggtactggcggcgaaagcgcgcggtaaccgggtgattgcggttggcaccactagtgtacgtagcctggaaagcgcggctcaggcagcgaaaaacgatctcattgaaccgttcttcgacgatacccaaatctttatctatccgggcttccagtacaaagtggtcgatgcgctggtgacgaacttccacttgccagagagcacgctgattatgctggttagcgcctttgccggttatcaacacaccatgaacgcctataaagcagcggtagaagagaaatatcgcttttttagttacggtgatgcgatgtttatcacgtacaatccgcaggcaattaatgagcgcgtcggggagtaattccgcggcgctggtttaaaacgttggactgtttttctgacgtagtggagaaaaaatgaaatttgaactggacaccaccgacggtcgcgcacgccgtggccgcctggtctttgatcgtggcgtagtggaaacgccttgttttatgcctgttggcacctacggcaccgtaaaagggatgacgccggaagaagttgaagccactggcgcgcaaattatcctcggcaacaccttccacctgtggctgcgcccgggccaggaaatcatgaaactgcacggcgatctgcacgattttatgcagtggaaggggccgatcctcaccgactccggcggcttccaggtcttcagccttggcgatattcgtaaaatcaccgaacagggcgtgcacttccgtaacccgatcaacggcgatccgattttcctcgatcctgaaaaaagtatggagattcagtacgatcttggtagcgatatcgtcatgatctttgatgagtgtacgccgtatcctgctgactgggattacgcaaaacgctccatggagatgtctctgcgttgggcgaagcgtagccgtgagcgttttgacagtctcggaaacaaaaatgcgctgtttggtatcatccagggcagcgtttacgaagatttacgtgatatttctgttaaaggtctggtagatatcggttttgatggctacgctgtcggcggtctggctgtgggtgagccgaaagcagatatgcaccgcattctggagcatgtatgcccgcaaattccggcagacaaaccgcgttacctgatgggcgttggtaaaccagaagacctggttgaaggcgtacgtcgtggtatcgatatgtttgactgcgtaatgccaacccgcaacgcccgaaatggtcatttgttcgtgaccgatggcgtggtgaaaatccgcaatgcgaagtataagagcgatactggcccactcgatcctgagtgtgattgctacacctgtcgcaattatagtcgcgcttacttgcatcatcttgaccgttgcaacgaaatattaggcgcgcgactcaacaccattcataaccttcgttactaccagcgtttgatggcgggtttacgcaaggctattgaagagggtaaattagagagcttcgtaactgatttttaccagcgtcaggggcgagaagtaccacctttgaacgttgattaatattaataatgagggaaatttaatgagcttttttatttctgatgcggtagcggcaacgggtgcaccggcgcaaggtagcccgatgtctttgattttgatgctggtggtattcggtctgattttctatttcatgatcctgcgtccacagcagaagcgcaccaaagaacacaaaaagctgatggactccattgccaaaggtgatgaagttctgacgaacggtggcctggttggtcgcgtaaccaaagtagcggaaaacggctacattgctatcgcgctgaatgacaccactgaagtagttattaaacgtgacttcgtagctgccgtcctgccgaaaggcaccatgaaggcgctgtaattaaaatttttccctaagggaattgccgtgttaaaccgttatcctttgtggaagtacgtcatgctgatcgtggtgattgtcatcggtctgctgtatgcgcttcccaacctgtttggtgaggatccggctgttcagatcactggtgcgcgcggagtcgccgccagtgagcaaacgctgatccaggtccagaaaacgttacaagaagaaaaaataactgctaagtctgtggcactggaagagggcgctattcttgcgcgcttcgactccactgacacccagttgcgcgctcgtgaagcattaatgggcgttatgggtgacaaatacgtcgtggcgcttaaccttgccccggcaacgccgcgctggctggcagctattcacgctgagccgatgaagctcggccttgacctgcgtggcggcgttcacttcctgatggaagtggatatggacaccgcgcttggcaaactccaggaacaaaatatcgatagcctacgcagtgacctgcgcgaaaagggcatcccgtataccactgttcgtaaagaaaacaactacggcctgagcatcactttccgcgatgctaaagctcgtgatgaagccattgcgtatctgagcaagcgccatccggacctggtgattagcagccagggcagcaaccagctgcgtgcggtaatgagcgatgctcgtctgagtgaagcgcgtgaatatgcggtgcagcagaacattaatatcctgcgtaaccgtgtaaaccaacttggcgtggcggagccggtggttcagcgtcagggtgctgaccgtatcgttgttgaactgccaggtattcaggacactgcgcgtgcgaaagagattctgggtgcgacggcaacgctggaattccgtctggtaaacaccaacgttgaccaggccgctgcggcatccggtcgcgtaccgggcgactctgaagtgaaacagacccgcgaaggtcagccagttgtgctgtacaaacgcgtaattctgaccggtgaccatatcaccgactccacttccagccaggacgaatacaaccaaccgcaggttaacatcagcctcgatagcgctggtggtaacatcatgtctaacttcactaaggacaacatcggcaaaccgatggcaaccctgtttgtggagtacaaagacagcggtaagaaagatgcaaatggtcgtgcggttctggtgaaacaggaagaggtgattaacatcgccaacatccagtctcgtctgggtaacagcttccgtatcaccggcatcaacaacccgaacgaagcccgtcagctgagtctgctgctgcgtgccggtgcgttgatcgcgccgattcagattgttgaagaacgtaccattggcccaaccctgggtatgcagaacattgaacaggggctggaggcttgccttgccggtctgctggtttctattctgttcatgatcatcttctataagaagtttggtctgattgcgaccagtgctctgattgccaacttgatcttaatcgtcggcattatgagcctgttgccaggcgcaacgctgagtatgccaggtatcgcgggtatcgtcttaacccttgcggtggcggtcgatgcgaacgtactgatcaacgaacgtattaaagaagagttgagcaacggacgtactgttcaacaggcaattgatgaaggttatcgtggcgcattcagttctatcttcgatgcgaacatcaccacgctgattaaagtcatcatcctgtacgcagtgggtaccggggcaattaaagggttcgcgattactaccggtatcggtgtggcgacgagcatgtttaccgcgattgtcggtacgcgtgccatcgtaaacctgctatatggcggcaagcgcgtcaagaagctgagtatctgaggagtgcgatgtggcacaggaatatactgttgaacaactaaaccacggccgtaaagtctatgactttatgcgctgggactactgggctttcggcatctctggtctgctgttaatcgctgctatcgttattatgggcgtgcgcggctttaactgggggctggatttcaccggtggtacggttattgaaattacgctcgaaaaaccggctgaaattgacgtaatgcgtgatgcattgcaaaaagccggttttgaagagccgatgctgcaaaactttggtagcagccatgacatcatggtccgtatgccgcctgctgaaggcgaaaccggcggtcaggtgttgggcagccaggttctgaaggtgattaacgaatccaccaatcagaatgcagcagtgaagcgtattgagttcgtcggtccgagcgtgggggcagaccttgcgcaaaccggtgcgatggcgttgatggcagcgctgctgtctatcctcgtgtacgtaggtttccgctttgagtggcgactggcggcaggggtggttattgcgctggcgcacgacgttatcattacgctgggtattttgagcttattccatatcgagattgacctgaccattgtggcaagcttgatgagcgttatcggttacagccttaacgacagtatcgtggtaagcgaccgtattcgtgaaaacttccgcaagatccgtcgcggtacgccttacgaaatctttaacgtgtccttgacccagacgctgcaccgtaccttgatcacatccggtactaccttgatggttatcctgatgctgtacctcttcggtggtccggtactggaaggcttcagcctgaccatgcttatcggtgtttccatcggtactgcatcttccatctatgtggcatctgcgttggctctgaaactgggtatgaagcgcgaacacatgttgcagcagaaagtggaaaaagaaggggcggatcagccgagtattctgccgtaatcaagttcccgttgatgttgaaaatcccggtcagaagatcgggattttttttgatgtatggagattgcgaaaatccccgcatcttgggaaactgcgcgtaaccctacatttcatccaggtaacttttcatggctatcatcccaaaaaactatgcgcggttagaaagcggctatcgcgaaaaagcattaaaaatctatccgtgggtctgcggtcgctgttcccgcgagtttgtttattccaacctgcgtgaacttaccgttcaccacattgatcacgaccataccaataacccggaagatggcagtaactgggaattgttgtgtctctattgccacgatcatgagcatagcaaatataccgaagcggatcagtatggtacgaccgttatcgcaggggaagatgcgcagaaagatgtcggtgaagcgaagtacaacccattcgctgacctgaaagcgatgatgaacaagaagaagtgattaaaacgtaaaattgcctgatgcgctacgcttatcaggcctacgttatttcagcaatatattgaatttacgtgcttttgttggccggacaaagcgtttacgccgcatccggcatgaacaaagcacacgttgttaacaatcagaaatgccgggaataaatcccggcattttcataatcagaagttgtaacctactaccaggtaaccaccccagccggtagagcgaacgttgaagttgccgttgccgaagttcagttctgcatcgtcgttccactgaccaccgtcgtgccagtaacgagctacgacagagtagtgccagtgatcgtagttcagagccagaatatggctggaagcgatagagttattagtacgggtcttaataccgttgattgcgttaccgctgtcatcccctaaatcggaaccccagtcgaagttggtgaagccgatgtagctcagctgaccgccccacagatcggtaatcggcacaaagtatttaattttgaaacggtaaccgtcccactcgttttcgttcgctgcgccatagttctgccactggtatttcgcatagacgttcatggacaggctcatcggcaggccagtgtcgatatcggtacccagacccatgtaccaggtgctctggcgaccatctttattacgacccatgtcgtaaatgtagttgttcgcgaagtaccactctttgaacggaccgaagctaaggtcagtattggtcagcttgtcgatggagaaacgtggttcgatttccataaacagcggagaaccgtggttccagatacctttagcatcggagttaccgccgaagaataccggcgcatccgcataaccatagaagtcgaaccagtcttttttagcgaatgcttcgtactcaaggtaggtatcgttgcggatctgcggtccgaaacgggtgtgatagcttccgacaacgttaacgctctggtgccaccagtcggaaagatactgcggtttgtcgttttcagctgcgttgacagtaaaagagctagagagcgccagtaccgcaccggctgccagtaatgtttttttcatatgtatgccactgtttgaaaatcccttgcgggagtgaaaaaggcgcaaattgcgtttctaaatatttcgtatacagaggagcctattataaaaatcattgctcacaaaaatatgtttcgtttcacagttctatcatttacgtaatcgattgcgttcacgtttacacacattcgggcggggattgtactgactttcgcccttgttgcaaacttttactatcaatccaggtgatgtaagcagagtaacaaaatgacggggaaagatgttgcgggacgcacaaaatcgtcccgaaatacgtttactgcataacaggttgaatgtcgtggatacgtacaaagcctaactgatccacagaaatcccctttaactgtaacggaatatcaacatcgctgggggcgaggacgctggcaggggcattaatcaattgattctgcacattgatttcctgaaagttgtctattgttccctgaatttgcccatattcaacagttccgctgaatgcgggcaagggatcattgctctcaccctgaatacgtagtgtaagggtggtgccatctgcatcaggcgtaatattcaccaggctcatacgtaaagtaccgatctggctttccagtcttgccggtgttttcgctccaggcagaaggtaaaccccactgctggattttgcattcagcctgttttgctgagtgattttgactgtttcttgattgagttgcgtcatctcctggttcagcgtgctgacgctgtgtttcatctgtcgcacttcactttgctgcacacaggcgctaaggctgaacaggcttcccagcaggagcagtcgaaaaacgttagtattcataggtcgtccctttctcgtcgcaattagcctaatggtagagggtaaaagcagcgaaagcatcgatcctttatctcaaaagcgttgcgcctttgttgtatcgtcagttcagggtaaaatagatttccgttaaccacctggtcaggacgccgtatgcattgcccattctgtttcgccgtggacactaaggtaattgactctcgtctcgtgggcgagggtagttccgtacgccgccgtcggcagtgtctggtgtgtaatgaacgtttcaccacctttgaagtggcggagctggttatgccgcgtgttgtaaaaagcaacgacgtgcgtgaaccgtttaatgaagagaaattgcgtagcggaatgctgcgggcgctggaaaaacgtccggtgagttccgatgacgtcgaaatggcaatcaatcatattaaaagccagctgcgcgccaccggtgagcgcgaagtgccgagcaagatgattggcaatctggtgatggagcaattgaaaaagctcgataaagtcgcctatatccgttttgcctctgtctaccgcagtttcgaagatatcaaagaatttggcgaagagatcgcgcgcctggaggactaagccgtgcaggacgagtattacatggcgcgggcgctaaagctggcgcaacgaggacgttttaccacgcatcccaacccgaatgtcgggtgcgtcattgtcaaagatggcgaaattgtcggtgaaggttaccaccaacgtgcgggtgaaccacatgccgaagtacacgcgttgcgtatggcgggtgaaaaagccaaaggtgcgaccgcctatgtcacactcgaaccctgtagccatcatggtcgtacgccaccgtgctgtgacgcactcatcgccgctggcgtagcgcgcgtggttgccagcatgcaagatcctaacccgcaggtcgctgggcgtggactttaccgtctgcaacaggctggcattgacgtcagccacggcctgatgatgagtgaagccgagcaattgaataaaggctttctcaagcggatgcgcaccggctttccttatattcagttaaaacttggcgcaagccttgatggtcgcacggcgatggcgagcggcgaaagccagtggatcactagcccccaggcgcggcgtgatgtacaactactgcgcgcgcaaagtcatgccattttaaccagcagcgccacggtgctggcggatgatcctgccttaacggtgcgttggtctgaactggatgaacaaactcaggcgctctatccgcaacaaaatctccgtcagccgatacgtattgtgattgatagccaaaatcgcgtgacgccggtacatcgcattgtgcagcagcccggcgaaacctggttcgcgcgtacgcaggaagattctcgtgagtggccggaaacggtgcgtaccttgctgattccagagcataaaggtcatctggatctggttgtactgatgatgcaactgggtaaacagcaaattaacagcatctgggtggaagcggggccaacgctcgctggcgcattgctgcaggcgggtttagtcgatgagctgattgtctatatcgcacctaaactattaggcagcgacgcccgcggattatgcacgctgccagggcttgagaaattagccgacgccccccaatttaaattcaaagagatacgtcatgtaggcccggatgtttgcctgcatttagtgggtgcatgatctcccggctcgaaagggaagcagcgcacgaaatattatgctaaaatccgcccccctgcggggccatactcgaacccgaaggaagaaaatgaacattattgaagctaacgttgctaccccggacgctcgcgtcgccatcaccatcgcgcgtttcaacaactttatcaatgacagcctgctggaaggtgcaattgacgcactgaaacgtatcggtcaggtaaaagatgaaaacattaccgttgtttgggtgcctggtgcctatgagctgccgctggcggcgggtgcactggctaaaaccggtaaatacgacgcggtgattgcgctgggtacggttattcgtggtggcactgcccactttgaatatgtcgctggtggtgcaagcaacggcctggcgcatgttgcccaggacagcgaaattccggttgcttttggggttctgaccactgaaagcattgaacaagcgatcgaacgtgctggcaccaaagctggcaacaaaggtgcagaagctgcactgaccgcgcttgaaatgattaatgtattgaaagccatcaaggcctgaaattagtaaggggaaatccgtgaaacctgctgctcgtcgccgcgctcgtgagtgtgccgtccaggcgctctactcctggcagttgtcccagaacgacatcgctgatgttgaataccagttcctggctgaacaggatgtaaaagacgttgacgtcctgtacttccgtgagctgctggccggggtggcgactaataccgcatacctcgacggactgatgaagccatacctgtcccgcctgctggaagaactgggacaggtagaaaaagcagtactgcgcattgcgctgtacgaactgtctaaacgtagcgatgtgccatacaaagtggccattaacgaagcgatcgaactggcgaaaagcttcggcgcagaagacagccataagttcgtcaacggcgtactcgataaagcagcacctgtgattcgccctaacaaaaagtgatatccaggccggtagattcacggaagaccgttccatgatcgccggccttttcttttttacctgctgaggcataacgtatggcatgtggcgagttctccctgattgcccgttattttgaccgtgtaagaagttctcgtcttgatgtcgaactgggcatcggcgacgattgcgcacttctcaatatccccgagaaacagaccctggcgatcagcactgatacgctggtggcgggtaaccatttcctccctgatatcgatcctgctgatctggcttataaagcactggcggtgaacctaagcgatctggcagcgatgggggccgatccggcctggctgacgctggcattaaccttaccggacgtagacgaagcgtggcttgagtccttcagcgacagtttgtttgatcttctcaattattacgatatgcaactcattggcggcgataccacgcgtgggccattaagtatgacgttgggtatccacggctttgttccgatgggacgagccttaacgcgctctggggcgaaaccgggtgactggatctatgtgaccggtacaccgggcgatagcgccgccgggctggcgattttgcaaaaccgtttgcaggttgccgatgctaaagatgcggactacttgatcaaacgtcatctccgtccaagcccgcgtattttacaggggcaggcactgcgcgatctggcaaatagtgccatcgatctctctgacggtttgatttccgatctcgggcatatcgtgaaagccagcgactgcggcgcacgtattgacctggcattgctgccgttttctgatgcgctttctcgccatgttgaaccggaacaggcgctgcgctgggcgctctctggcggtgaagattacgagttgtgtttcactgtgccggaactgaaccgtggcgcgctggatgtggctctcggacacctgggcgtaccgtttacctgtatcgggcaaatgaccgccgatatcgaagggctttgttttattcgtgacggcgaacctgttacattagactggaaaggatatgaccattttgccacgccataaagatgtcgcgaaaagtcgcctgaagatgagtaatccgtggcatctacttgctgtcggattcggaagtggattaagcccgatcgttcctgggacgatgggcagcctggcagcgattccgttctggtatctgatgacctttttgccctggcagctctacagcctggtggtgatgctggggatctgtatcggcgtctatctttgtcatcaaacggcgaaagacatgggtgtgcacgatcatggcagcattgtctgggacgaatttattggtatgtggatcacgctcatggcgctgccgaccaatgactggcagtgggttgccgccgggtttgtgattttccgtattctggatatgtggaagccgtggccgatccgctggtttgatcgcaatgtgcatggcggcatggggatcatgatcgacgatattgtcgccggggtgatttccgcaggcatcctgtattttatcggtcatcactggccgctgggtattctgagctaattgtgcaccgatgcctgatgtgacgcttgtcacgtctcatcaggcctggactcttatttaaatcctacgacaggatgcggtttatacggcgtttccagttcggcaatctgttccggcttcaaagtgatatccaccgcgttcaatagctcatcaagctgttcttcgcggctagttccgataatcggtgcggcaatgcccggtttactcaacaaccaggccagcgcaacttgtgctcgtgtcgcccccagttcttcactgacgcctgttaaccgctctgcgatctgcgcgtcattttcatcgctttctttatagagatttttccccacctcatcagacaccagtcgtgcggtagtttctccccacggacgcgtcagacggccccttgccagcgggctccatggaattaccgccacgccctcctgataacacagtggtagcatctcgcgctcttcttcacgataaatcagattgtagtgatcctgcatactgacaaactgcgcccagccgtgctgtttttggagttccagtgcctgagcaaactggctagcgtgcatactactcgcgccgatataacgcgctttcccggcttttaccacgtcgttgagggcttccagcgtctcttcgatcggcgtgttgtaatcccagcgatgaatttgcaggatatcgacataatccatgccgagacgtcgcaggctgtcgtcgatagagcgcaaaatttgcgcacgggataatccttccggtaaatcaccaacgcgatggaacactttggtcgcaacgaccacgtcttcacgacgggcgaaatcccgcagtgcgcgaccgacgatctcttcgctgctgccgtcagaataactgttggcggtatcaaagaaatttatgccgccttccagtgcacgtttaattatgggacggctgctttcttccggcagtgtccatgcgtgattaccgcgatctggctcgccaaaggtcatacagccgaggcaaagtcgggaaacgcgaaggtcggtttttcctaaggggttgtattgcatgctgccactcctgctatactcgtcatacttcaagttgcatgtgctgcggctgcattcgttcaccccagtcacttacttatgtaagctcctggggcttcactcgtttgccgccttcctgcaactcgaattatttagagtctatgaataatttcttaagcatagcaggagtggagtagggattatgccagccaggccttgattttggcttccataccagcggcatcgaggccgagttcggcgcgcatttcttcctgagttccttgcggaataaagaagtccggcaggccaatgttcagcacgggtactggtttacgatgggccatcagcacttcgttcacgccgctgcctgcgccgcccataatggcgttttcttctacggtgaccagcgcttcatggctggcggccatttccagaattaacgcttcatcaagcggtttcacaaaacgcatatcgaccagcgtggcgttcaggctttcggcgactttcgccgcttctggcatcagcgtaccaaagttaaggatcgccagtttctcgccacgacgcttcacaatgcctttgccaattggtagtttttccagcggcgtcagttccacgccgaccgcgttgccacgcgggtagcgcaccgcactcgggccatcgttatagtgatagccggtatagagcatctggcgacattcgttttcatcgctcggggtcataatgaccatttccggtatgcagcgcaggtaagagagatcaaaagcaccctgatgggtttgaccgtcagcaccaacaatgcccgcgcggtcgatggcgaacaggaccggaagcttttgaatcgccacgtcatgcagcacctgatcataggcgcgttgcaggaaagtggagtaaatcgcgacaatgggtttgtacccaccaatcgccagacccgcagcaaaggtcaccgcgtgttgctcggcaattgccacgtcgaagtagcgatccgggaatttacgactaaactcgaccatgccggaaccttcacgcatcgccggagtaatcgccatcagcttgttgtctttcgctgccgtttcgcacaaccagtcgccaaagattttactatagctcggcaaaccgccgctacttttcggcaaacaaccgctggagggatcaaatttaggcacggcgtggaaagtgatcgggtctttttctgccggttcataaccacgaccttttttggtcatgatatgcaggaactgcgggcctttcaggtcgcgcatgttctttagcgtggtgataagccccagcacatcgtgaccgtccaccgggccgatgtagttaaagcccagctcttcaaacaacgtgccaggcactaccatgcctttaatatgttcttcggtgcgtttgagcagctctttaattggcggcacgccagagaaaacttttttcccgccttcgcgcagactagagtaaagcttaccggaaagcagctgtgccagatggttgttgagcgcgccgacattttcggaaatgctcatttcattgtcgttgagaatcaccagcatatcaggacggatatcgcccgcgtgattcatcgcttcaaacgccatgcctgcggtaatcgcgccatcgccaatgacacagacggtgcggcgatttttgccttctttttcggcagcaaccgcaataccaattccggcactgatggaggtactactatgcccgacgcttaatacgtcatattcgctttcgccgcgccacgggaacgggtgcagaccgcctttctgacggatggtgccgattttgtcgcggcgtccggtcaaaattttatgcggataagcctgatgccccacatcccaaatcaattggtcaaacggggtgttgtagacatagtgcagcgccacggtcagttcgaccgtgcccagcccggaggcgaagtgcccgctggaacggctcacgctgtcgagtaaatagcggcgcagttcgtcgcagagtttcggtaaactctctttcggcaacagtcgtaactcctgggtggagtcgaccagtgccagggtcgggtatttggcaatatcaaaactcatcaggggcctattaatacttattgtttatttattacgctggatgatgtagtccgctagcgcttccagtgcgctggtatcgagactctgttcagccagttgtttcaggctctgacgggcatcgtcgatcagatcccgggctttcttccgggcttgctcaagacccagaagtgcagggtaggtacttttaccaagttgctggtcggcaccctggcgttttcccaacgttgcagtatctcccaccacatccaggatgtcatcctgaacctggaaggcaaggccgatgctctctgcatacttgtcgagtaccggcagagcacgacgtcctttatctccggcgcttaatgcaccaaggcgaacggcggcgcgaatcaatgcgccggttttatgacgatgaatacgctcaagcgcgtccagaggtacgtgtttgccttccgcgtctaaatctaatgcctgaccaccgcacattccggcaataccactggcgctcgccagttcagaaatcatgctaattctgtcgcggtcgctcacttccggcatatcggcatcgcttaaaatgctgaacgccagcgtttgtaaagcgtcgccagcgagaatcgcgtttgcttcgccaaacttcacatggcaggttggcaaaccgcgacgcagatcgtcatcatccattgccggtaaatcatcatgaattaaactgtaagcgtggatacactcaacggcggcagcgggtgcgtccagcgtgtttgtgctaacgccgaacatatgaccggtggcataaaccaggaaaggtcgcaggcgcttaccacctaataatgcgccatactgcatggtttcgaccacgggagtgttctgaaagggcagtggggcgataaaacggctcagcgcctggttggcctgcttaacgcaggcttcgagttgctgcggaaagtccattactcattgtccggtgtaaaaggggttagagaggcgtcttcattgtcagacagcagaatttgtacgcgctgttcggcttgttgtaatttggcctgcccctgacgtgccagctgcacgccgcgttcgaactcgttcagcgcctcttccagcggcaggtcgccactttccagacgggttacaatctgttccagctcgctcagcgccttttcaaagctggcgggcgcctcatttttcttcggcataatgaatgtctgactctcaatatttttcgccccgtcatggtaacggactcagggcaaatagcaaataacgcgcaatggtaaggtgatgtgcacagcaaagcgatgttagtggtatacttccgcgcctggatgcagccgcaggtgtgggctgctgtatttttccctatacaagtcgcttaaggcttgccaacgaaccattgccgccatgaagtttatcattaaattgttcccggaaatcaccatcaaaagccaatctgtgcgcttgcgctttataaaaatccttaccgggaacattcgtaacgttttaaagcactatgatgagacgctcgctgtcgtccgccactgggataacatcgaagttcgcgcaaaagatgaaaaccagcgtctggctattcgcgacgctctgacccgtattccgggtatccaccatattctcgaagtcgaagacgtgccgtttaccgacatgcacgatattttcgagaaagcgttggttcagtatcgcgatcagctggaaggcaaaaccttctgcgtacgcgtgaagcgccgtggcaaacatgattttagcagcattgatgtggaacgttacgtcggcggcggtttaaatcagcatattgaatccgcgcgcgtgaagctgaccaatccggatgtgactgtccatctggaagtggaagacgatcgtctcctgctgattaaaggccgctacgaaggtattggcggtttcccgatcggcacccaggaagatgtgctgagcctcatttccggtggtttcgactccggtgtttccagttatatgttgatgcgtcgcggctgccgcgtgcattactgcttctttaacctcggcggcgcggcgcatgaaattggcgtgcgtcaggtggcgcattatctgtggaaccgctttggcagctcccaccgcgtgcgttttgtcgctattaatttcgaaccggtcgtcggggaaattctcgagaaaatcgacgacggtcagatgggcgttatcctcaaacgtatgatggtgcgtgccgcatctaaagtggctgaacgttacggcgtacaggcgctggtcaccggcgaagcgctcggccaggtgtccagccagacgctgaccaacctgcgcctgattgataacgtctccgacacgctgatcctgcgtccgctgatctcttacgacaaagagcacatcatcaacctggcccgccagattggcaccgaagactttgctcgcacgatgccggaatattgtggtgtgatctccaaaagcccgacggtgaaagcagttaaaagcaagattgaagcggaagaagagaagttcgacttcagcattctcgataaagtggttgaggaagcgaataacgttgatatccgcgaaatcgcccagcagaccgagcaggaagtggtggaagtggaaaccgtcaatggcttcggcccgaacgacgtgatcctcgatatccgttctatcgatgaacaggaagataagccactgaaagtcgaagggattgatgtggtttctctgccgttctataaactgagcaccaaatttggcgatctcgaccagaacaaaacctggctgctgtggtgtgagcgcggggtgatgagccgtctgcaggcgctctatctgcgcgagcagggctttaacaatgtgaaggtatatcgcccgtaatttgtggtttttacgtcgcatctggtcagatgcgacgtttgccgcatccgacattactcgtaataattataaatccctgccgccatcaccagttgacttgccacttcatgggctttttcacgcccaaccaacaggtcgataattttcagaccaaagtcgatagctgtacccggcccctggctggtcagcaattttacccgtgcatcccagacgacgcgcttgtccagccattgttcggcgggaattttgtctttcagcgtcgggaagccggtcatattaccaatcgggaagatatcgtgcggcaccagcacggtggctggcgcggcgcaaatagccgcgacgatacgcccggaacggtggaactgtttaacggtttcaaccagcagagtgctatcgcgaaaacactccgcgcctttaatgccaccaggcagcacgatcacgtcatattcgccatcagccacttcgaccagcggcgcatccgccagcagcttcacgccgcggctgcaggtaatcgccaggttaccatcgctggcgacgctggcagtggtgactttgataccgccgcgaaccagcagatcgatagtggtgacggcttcagtctcttcactaccaggggcgaggcaaaccagtgcgcttgcgctcatattcactctcctttctttttttaattaccaggggcgaggcaaaccagtgccgatgcgctcatattcactctcctttctttttaccatttcaaacaggcgggtgttttccggtacggcaatcccatgcgcgcgggcgcggcgtaagagaaaaccattgatatagtcgatttcagtgtggcgcagcgcgcggatatcctgcaacatgctgctgatattttccgctgtggcatcaatcacctgcatcacgtaatcacgcaaatcttctgcactagtatgatgcccttcgcgttcgatcaccgccgcgacttcttcgcatatctgcataatttcttgcggatgatgacgtaattcaccgttcgggcaattccagatggcagtcagtggattaatcacgcagttgactgccagcttgcgccacagctcggcgcgaatattgttatgccaggcaacgtcaggcaacacggtttgcaaaatatccgccagataactgtaatccccgtcctgttgccgtgccgggccaatatgcgtgataccgtttgccacatgaataatgacattgccgtcgcggcgggctgcatgggtggtggtgcccatcagtaatggctgctgaatgttttgcaactcttcgatggtgcccatgccgttgtgaattaacagtattggcgtagttacaggcagtgtggacgcgaggcttttgacggcatcggaaacctgccatgctttcagcgtcaccaggagcagatcgctggtggcgagaaaatcgggatcgttggcggtcaggctttcgttaaatatgctaccatctgtctcaaccagattcacgctacaataaggttgcggtacgcgcagccagccctgaacttcatgaccctgtttgcaaagtgctgtaagccataattgccctaaggcaccgcatcccaatacggtaattttcattgttcctcctcacccgcaaccactccgggtgttcaataaggctatcccttaattgtgcatgctgttgcgactatgcacaattaagggatacgtcctggtgcaggactgtcggttatttaactttgcgggtattatgcttcgcatcaaaaatgaagggagaggaaaagatgccatctttcgatattgtctctgaagttgatcttcaggaagcacgtaacgcggtcgataacgcgagccgcgaagtggagtcccgttttgacttccgtaacgttgaagccagttttgagctgaacgacgccagcaaaaccatcaaagtgttgagcgagtccgatttccaggtcaatcagttgctggatattctgcgtgccaagctgctgaagcgcggcattgaaggcagtagcctggatgtaccggagaatatcgttcatagcggtaaaacctggtttgtggaagcgaaactgaaacagggcattgagagcgcgacccagaagaaaatcgtcaagatgatcaaagacagcaaactgaaagtgcaggcgcaaattcagggcgatgaaatccgcgtaacgggcaaatctcgtgatgatttgcaggctgtcatggcgatggtacgtggtggcgatctcggtcagccgttccagttcaaaaacttccgcgattaatcgcgactatgtgcgttttgttcatgtcagatgcggcatgaacgcctgattcggcctacaaaggtttgtaattcagaaactttgtaggcctgataagcgtagcgcagcaggcaattcgccgcgttttttatgcctgacgaattgcctgttctatctcaaagcgattcgtcactttgctgtcgattttcacataagcactatgttcttcttctgcaatcaacacttctttgatgccttcagtttctagcaaacgcacttttaacgcctcgtttgcggcaatgttcgccgggatttcaatgcgcaaactgctgacatacggcggttctttcatggtactggcgactgtcagccacactgcggccagcattgcgccagcgagaaataccccctgaccgtcaaacatgccgttaatccagccgcccaggctaccgccaatcgccacgccaagaaactggctggtggagtaaacacccatcgccgtacctttgtaacctgctgggctctctttactgataagactgggcaggagggcttccatcaaattaaacgccacaaagaaaagctgcacgccgaccaccagttgccagaactgcgtttgcgcgttccacaacacaatttccgcaaccacgatcaacccgacgcagaagacaaagacttgcttcattttgcgcttaacttcagcgtagataatgaaaggcacgacgctgccaaaggcgattagcattgtcgccagatagaccttccagtgttcagccgccgggaaccctgcatcagccagttgtccgggcagggcaacaaacgtgctcatcagcaaaatatgcagacacataatgccaaagttgagtttcagcagccgcggttccgccagcactttactgaaactgcctttcaccattccggactcacgattaagtacgtgagtgctactgttgggcacaacccaaatggtcaacgcaatgccggtcgttgccagaatagcgatcatccagaacagcgcgtgcagcccaagtttgtgagtgatgatcgggccaagcaccatcgcaatggcaaaggtaatgccaaagctcacgccgataaacgccatcgctttggtgcggttttgttcgcgcgtgagatcggaaagcagcgccataacggcggcggcaattgctccagagccttgtagcgcccggcccagaataattccccagatggagtcggaaagcgcagcgataacgctaccggcggcaaacaccgccagcccaccgacaattaatggtttgcgaccaatgcggtcggaaagcaggccaaacggaatctgaaaaacggcctgagtcagaccataaataccaatggcaataccgattaatgcttcgctggcaccttgcagagccatgccgtacgtggtcagaaccggcagaaccataaacatgcccagcatgcgcaagctgaatacggtccctaaaccccaggtcgcgcgcctctcacctggcgtcattttataatcgttcattaccacctctgttttaaattcgcgactagtgtaaagcggcaaacgaatggggtaaacatgcggattttttagtaaatatttcgagagggatatgtttctaatgctaagaaaaaaggtgccgtagcacctttttaatagagaggttttgttaccacacagcagccagcagcgtatggctgtccggtaccataaaatcaacggacatcatcacgctgagggcagtgatggcgatgatagagaagccgaacagcttgcgcgcccagattctgtcatcagcaactttataaccgcgcagagccatacctaaccaccagacgctaaccgccgcggcgaccaccagatatttatacccagcgtaaccgccaagagagagcatcagcgtggcaacggcaaaggcgatgatatacagcgtgatgtgattcttcgccacgctaatgccttttaccactggcaataccggaatgtttgccgcctggtaatccttaaagcggaaaatggcgatggcataggagtgaggcatctgccacaggctgaagatagccagcaggatcgctgcgccgctatcgaactcaccggttaccgcacagtagccgatcaccggcggcgcagcgccggagaggctaccaatcaacgtgccgtagacagagtggcgtttcatgtacaggctataaacgccgacataaaccacaaagcccatcacccccagccagcaggccagcggattcgcgccaaaccacagcagcataaagccagcaatacccagcaacgtggcgtacaccaggctgacagcaggagagatcaggcctttcaccagcacccgattcttcgtcctttccatctttctgtcgatatccctgtcgatgtagttgttaaacacacaaccgctcgccacaaccagactcaccccaaccagcgtgtagataaacaggggataatcaatgctgcccttactggccagcaggaatcccccaatcacgctgatcaggttgccaaagatgatgcctggtttcgttacttgcaggtattgcttaaacatcataaccgccgctcttagtgcatcatcatgttgtagttgaggttccacataatccagatggagcctacaaccaggatagcgatgattagcacggtgaagacaaacgccgtcatgttccagccttcatcacttttggtattcatgtgcaggaagcacaccagatgcaccagaacctgtaccactgccattgccaggattgttcccagaattacggccggagaggcagctcctgtcatcaccatccagaacggaatcaccgtcagaatgatgctcaggataaagcctgtcatgtaggtttttacgctgccatgggacgcgccgctgtgatcggtagaatgactcattacatcgccccccatcagataaacaacagtgaacacacagatccaaaccacatccaggaagtgccagaacaggctcaggcacatgatgcgggtacggttagtgctggtcaggccgcgacgggcgatttgcaccatcagcaccgccatccagataagaccagaagtgacgtgcagaccgtgcgtgccgaccagcgcaaagaacgcactcaggaagccgctgcgatccggacccatgccgttaacaatcaggtgatggaattcatagatttccatcccgataaatccggcaccaaacaaccaggtcaacgccagccaggagataacctggcttttgttgtttttgtacatggcgatagccgccatgccgtaggtgatggagctgaacaacagcaagaaagtttcaaccagaacgaacggcagttcgaaaatgtccttacctgtcgggccgcctgcggtgccgttcaccagaacggcataggtagcaaacaagatagagaacagaatgcagtcgctcatcaggtagatccaaaatccgaagattttggttccgcctgcatcgtggtgcccgtgttcgtgcgcgtgggcagtcgcgtgcgtcaaagtatcagttgccatttttcagccctgccttagtaatctcatcgaaatgctggttttccagtttttcgatttctgccaccggcacgtagtaatccacgtcctcgtcgaagcttttcacgatccaggtgatgatcatgcctgcgaagccaacaatcgccagccaccagatatgccagatcatggcgaaaccgaagatggtggagaaagctgcaatgacgatacctgcaccgctgtttttcggcatatgaatttcttcatagtggtcaggctttttatacgcttcgcctttctctttcatttcccagaatgcatcacgttcgtgaacgtgcggcactacggcaaagttatagaacggaggcggggaagaggttgcccactccagcgtacggccaccccacgggtcgccagtcaggtcacggttctggtcgcggtcgcgaatagaaacgtacatctgaataacgaggcagagaatacccagcgcaatcagtactgcaccgctggctgcaatcatcagcatggtgtggaactgcgggtcaatctgctggctcaaacgacgggtcatgcccatgaagcccagcgcatacagtggcataaaggcaacgaagaagccgatgatccagaaccagaacgcgcgtttaccccaggtttcgttcagtttgaaaccgaacgctttaggccaccagtaggtcatccctgcgaagcagccgaagaccacgccgccgatgatcacgttatggaagtgcgcaatcaggaacaggctgttatgcagaacgaagtccgcgcccggtacggccagcagcacgccagtcatcccgcccacgctgaaggtgacgataaaaccgatggtccacagcatcgcagaatggaacacgatgcggccctgatacatggtgaacagccagttgaagatcttcaccccggtcgggatggcgataatcattgtggtgataccaaagaaggcgtttacgttcgcgcccgcacccatcgtaaagaagtggtgcagccaaacgatgaagctcagcacggtgatacagacggttgcccataccaggctggtataaccaaacagacgtttacggctgaaggttgccgcaatttcggagaacacaccgaaaacaggcaggatcaggatgtaaacttccgggtggccccaggcccaaatcaggttgatgtacatcatcatgttgccacccatatcgttggtaaagaaatgggtgcccagatagcgatccagggtcaacaacgcgacggtaaccgtcagaattgggaaggaagcaataatcagtacgttcgcgcacagacttgcccaggtaaatactggcatcttgaacatggtcatgcccggtgcgcgcatcttcagaatggtaacgaagaagttgataccggtaagcgtcgtacctataccggatagctggagactccatatccagtaatcgacaccgactcccggactgtactctattccgcttagcggtggataggccagccagccggtctgcgcaaattcgcccacgccgagagaaacgttaaccagaatcacaccaacaacggtaaaccagaagcttaagttgttgaggaacgggaacgcaacgtcacgcgcgccgatctgcagcggaaccaccaggttcatcagaccgataacgaaaggcatcgccacgaagaagatcataatcacgccgtgcgcggtaaagatctgatcgtagtggtgaggtggcaggaagcccgcttcgcccgcgctggcaagagcctgctggctacgcatcataatggcgtcagcaaaaccacgcagcaacatcacaatcgccacgatgatatacatgataccgaggcgtttatggtcgacggaggtcagccactctttccacaggtaggtccacttaccgaagtaagtgatcaggccaacgagcgccagacctcccaaaataatgccagcgatcgtaaccatgacgataggttcatggaacgggactgcatcaagacttaattttccgaacatctttattcttcctcaacccctttaatgggcggattccgcgtggctcatgtccatgccttccataccttcgtgtgcgctgtgctcaccttctggctgggtcatgtccatgctcttaccgtgagccataaacttgttaattacatcggcaaacaagtctggtttcacgttggagaaatattccacctggttgtattcgctaggcgcggccagtttttcgaacgcagccatgtcagacatggtgttcgggctctgcttcgcttttgcgacccactggtcgaatgcggcgcgatccggtgttgcaatagctttgaacttcatgccactgaagcccgggccgctgtagctggcggagataccgtcataagtgccgggttcgttggcgatcagatgcaggcgagtctgcataccggccatggcataaatctggctacccagacgcggaatgaagaaggagttcatcacggagttggaggtcactttgaagtacaccggagtgttcgccgggaaagcgatttcattcacggtagcaatgccctgttccgggtagatgaagaaccatttccagtccatggaaaccacttcgatggtaatgggcttctcgtcgtgtgccagcggcttgctaggctcaagagcgtgagtggttttccaggtcagtactgcaaggaagatgatgattaagataggtaccgtccagaccacagcttccactttattggagtgactccagttcgggctgtacttagcatctttattgctcgcacggtacttccaggcgaaaccaacagccatcaagattgcgggaataacgacaatcaacatcaggccaaatgccgtcagtatcagactacgttgctccagaccaatctgtcctttgggatctaacagcgcagaattacagccactgagcaatacagtgcctgcaaataaactcaaccatcccaaacttttattgtatttcctgagtctcatttaacgacctcaattccacgggatctggtggcgtttaaagtgtgtgggcattttacgggaaggttacattactgtaaacatgattaaattcctgttacttggatttggctgccaggtcacatatgttgcaaaacatatcaggttgattttaagaagctgttgcaaaagggcgttataacaaaaggggagtgctgaaggagtctgggcgggcaattggtataaccaatgtgaaataaaacaattatttaacaaataattatcattagagtgacaactgggtgatgagaaaataaagactcattagctgaatcgtgtaagaaaaatagaatttataaatggcgccaataatttccaaacgctaagccgcacaaaagaacaaatattaataagcgatactgatgtttatttagccgtaataattacggcgagtgattactacagctaaataatatttacagattacgtcagatgcgtttttcgtagcgccagataatccagcaaaccaccaagcacgacgccagaaagggcgactaaaaccccgacttccagcagagcaggcaggaaagagaagtgcgtcaaatccagcgcgtccatcgtcaatagcagtaaccacacggccaacaggctgacgcccgccgccagtgtccacatggcaaaggcataacctgccggatatgcggtacgggagataaagttgtcatttactcgtgtatattcaagcgtctggcggcaaaccagcagcaaaataagccctggtacggcagcggcgacggagaatagatagaatgtgctccagccgtgtgcttcaacaaaccaacccgccacggggccgacataaactcgccctacagcagaaagcgcactgagcagggcaaattgagtagcggaaaaactcttattacatagcgtcattaacagcgcgacaaaggcacttgtgcccatcccgccacagaggttttcgaaaaagacggctgcgcccatgctgtagagatgcttatcagtaatgctcagcagccagtaaccggcgttagacgcaccttgtaaaatgccgaaaatcagcagtgcccggaacagactcaggcgctgcatcaaaatcccaccgtacaatgcgccaacaatggtcgctagtaagccaagcgttttgttaaccacgcctacttcacccgcatcaaacccgacgccgcgaatcaaaaacgtggttgtcaggctcatggcgaatgcgtcgcccagcttatacagcacgataagaagcaaaataagccaggcattattgcgaccaaagaaatctcgcagaggtgcaacaaccgcttgttccagcgttttgggcacaggaatggtgtcggttggttctggtgcaagcaacgtcgcgataatacaggggatcaacagtgccgccattaaccagtacatgccctgccagcccagccatttatctgccagccacagggctaggccgccggaaaccagcatccctaaacggtaacccagcacgctgattgccgcgcccgcaccacgttcttctgccggaagcacatcggttttccacgcatcgaagactatatcctgggaagcagagcaaaaagcgatcaccactgccagcgccgccatccagcggagttgggtgcctggttcgagaaaacccatcgccgcaatggcgactaataacaggatttgcgtggcgagcagccaaccgcgccgccgcccaaaaaatggaggcgtgtagcggtccatcagcggactccagaggaatttaaaaacgtaagcctggcctaccagagagaagaaaccaatggttttgagatcgatattctcgaccgtcatccaggcctgtaaggtaccggatgtcagggcgagcggtagcccggaagcaaaacccaggatcagcaatatggcactacgcggctgttgaaaaatacgtaaatattgactggacatgggcgtctacaggcccggcttgcaccgggccagagggcagaaattaacgcgcgttctgcttgatgaattcgtggatgctggtgtcctgagacatatcagcgatggtatcggtcagcacactgttaaccgcatcggcgatatttttgttggaggcctggaacgcaccttcaacgttgtagctggcacgatagtttttggtcattttgttgccattctgcgcggtagcgatgatggcgatatccgctttggtcgcgatgttgtagcgcacgttgccctgggacacgtcagcatacagttggctaacgatgatttgcagattaaccgggccattcggaccaaccatgtaaccacgcgcggtcatctgtttttccagcacttcttgcagcaggaaacgcagatcgcgggaggcggtcagggtaacgatttgattatcgcgggtgacttttgccagcgcctgatcggtacgctgatcggcaccattaatgcttacggtgacgcccatcaggcttggatcctgctgtggcagtgtaatcgtcggggaaacttcaatagttgttggcggttttgcgcatcctgcaagcataaacagagcaactaacgggaagaggatttttttgaacatgttcgggctctcagagactcttaagcgtgtttggtaaaaattcccgccatcataacattgccaacggcgaggggaagtgggtaaggcatgtaaattcatcatgttgacgaaataatcgcccctggtaaaagaaacactgatgcgaggcctgtgtttcaatctttaaatcagtaaacttcatacgcttgacggaaaaaccaggacgaaacctaaatatttgttgttaagctgcaatggaaacggtaaaagcggctagtatttaaagggatggatgacatctcagcgttgtcggaggagatatttcatgatgatacgtgagcggatagaagaaaaattaagggcggcgttccaacccgtattcctcgaagtagtggatgaaagctatcgtcacaatgtcccagccggctctgaaagccattttaaagttgtgctggtcagcgatcgttttacgggtgaacgttttctgaatcgtcatcgaatgatttacagtactttagcggaggaactctctactaccgttcatgcgctggctctgcatacttacactattaaggagtgggaagggttgcaggacaccgtctttgcctctcctccctgtcgtggagcaggaagcatcgcgtaaaaacgcatttgcaactgtcggcgcttttccagtatgttgctaaagattttatgaaaaacggcctgcgggccgttttgttttgtctggattttgcgctttttgcccagcattcagacgaaaattgcccgggaattgtgaaaaaatacgcgacagcgcgcaataaccgttctcgactcataaaagtgatgccgctataatgccgcgtcctatttgaatgctttcgggatgattctggtaacagggaatgtgattgattataagaacatcccggttccgcgaagccaacaacctgtgcttgcggggtaagagttgaccgagcactgtgattttttgaggtaacaagatgcaagttagtgttgaaaccactcaaggccttggccgccgtgtaacgattactatcgctgctgacagcatcgagaccgctgttaaaagcgagctggtcaacgttgcgaaaaaagtacgtattgacggcttccgcaaaggcaaagtgccaatgaatatcgttgctcagcgttatggcgcgtctgtacgccaggacgttctgggtgacctgatgagccgtaacttcattgacgccatcattaaagaaaaaatcaatccggctggcgcaccgacttatgttccgggcgaatacaagctgggtgaagacttcacttactctgtagagtttgaagtttatccggaagttgaactgcagggtctggaagcgatcgaagttgaaaaaccgatcgttgaagtgaccgacgctgacgttgacggcatgctggatactctgcgtaaacagcaggcgacctggaaagaaaaagacggcgctgttgaagcagaagaccgcgtaaccatcgacttcaccggttctgtagacggcgaagagttcgaaggcggtaaagcgtctgatttcgtactggcgatgggccagggtcgtatgatcccgggctttgaagacggtatcaaaggccacaaagctggcgaagagttcaccatcgacgtgaccttcccggaagaataccacgcagaaaacctgaaaggtaaagcagcgaaattcgctatcaacctgaagaaagttgaagagcgtgaactgccggaactgactgcagaattcatcaaacgtttcggcgttgaagatggttccgtagaaggtctgcgcgctgaagtgcgtaaaaacatggagcgcgagctgaagagcgccatccgtaaccgcgttaagtctcaggcgatcgaaggtctggtaaaagctaacgacatcgacgtaccggctgcgctgatcgacagcgaaatcgacgttctgcgtcgccaggctgcacagcgtttcggtggcaacgaaaaacaagctctggaactgccgcgcgaactgttcgaagaacaggctaaacgccgcgtagttgttggcctgctgctgggcgaagttatccgcaccaacgagctgaaagctgacgaagagcgcgtgaaaggcctgatcgaagagatggcttctgcgtacgaagatccgaaagaagttatcgagttctacagcaaaaacaaagaactgatggacaacatgcgcaatgttgccctggaagaacaggctgttgaagctgtactggcgaaagcgaaagtgactgaaaaagaaaccactttcaacgagctgatgaaccagcaggcgtaatttacgcagcataacgcgctaaattcgcacaaaggcccgtcaccgccaggtggtgggcttttttttgtcatgaattttgcatggaaccgtgcgaaaagcctctttcggtgttagcgtaacaacaaaagattgttatgcttgaaatatggtgatgccgtacccataacacagggactagctgataatccgtccataaggttacaatcggtacagcaggttttttcaattttatccaggagacggaaatgagttacagcggcgaacgagataactttgcaccccatatggcgctggtgccgatggtcattgaacagaccagtcgcggtgagcgctcttttgatatctattctcgtctacttaaggaacgcgtcatttttctgactggccaggttgaagaccacatggctaacctgattgtggcgcagatgctgttcctggaagcggaaaacccagaaaaagatatctatctgtacattaactccccaggcggggtgatcactgccgggatgtctatctatgacaccatgcagtttatcaagcctgatgtcagcaccatctgtatgggccaggcggccagcatgggcgctttcttgctgaccgcaggggcaaaaggtaaacgtttttgcctgccgaatagccgcgtgatgattcaccaaccgttgggcggctaccagggccaggcgaccgatatcgaaattcatgcccgtgaaattctgaaagttaaagggcgcatgaatgaacttatggcgcttcatacgggtcaaagtttagaacagattgaacgtgataccgagcgcgatcgcttcctttccgcccctgaagcggtggaatacggtctggtcgatagcattctgacccatcgtaattgatgccagaggcgcaactgtgccgctatacttatccagggcggcacaacgctgtaagcggcttgcgcctgagaatggcatttgcgtcgtcgtgtgcggcacaaagaacaaagaagaggttttgacccatgacagataaacgcaaagatggcagtggcaaattgctgtattgctctttttgcggcaaaagccagcatgaagtgcgcaagctgattgccggtccatccgtgtatatctgcgacgaatgtgttgatttatgtaacgacatcattcgcgaagagattaaagaagttgcaccgcatcgtgaacgcagtgcgctaccgacgccgcatgaaattcgcaaccacctggacgattacgttatcggccaggaacaggcgaaaaaagtgctggcggtcgcggtatacaaccattacaaacgtctgcgcaacggcgataccagcaatggcgtcgagttgggcaaaagtaacattctgctgatcggtccgaccggttccggtaaaacgctgctggctgaaacgctggcgcgcctgctggatgttccgttcaccatggccgacgcgactacactgaccgaagccggttatgtgggtgaagacgttgaaaacatcattcagaagctgttgcagaaatgcgactacgatgtccagaaagcacagcgtggtattgtctacatcgatgaaatcgacaagatttctcgtaagagtgacaacccgtccattacccgagacgtttccggtgaaggcgtacagcaggcactgttgaaactgatcgaaggtacggtagctgctgttccaccgcaaggtgggcgtaaacatccgcagcaggaattcttgcaggttgatacctctaagatcctgtttatttgtggcggtgcgtttgccggtctggataaagtgatttcccaccgtgtagaaaccggctccggcattggttttggcgcgacggtaaaagcgaagtccgacaaagcaagcgaaggcgagctgctggcgcaggttgaaccggaagatctgatcaagtttggtcttatccctgagtttattggtcgtctgccggttgtcgcaacgttgaatgaactgagcgaagaagctctgattcagatcctcaaagagccgaaaaacgccctgaccaagcagtatcaggcgctgtttaatctggaaggcgtggatctggaattccgtgacgaggcgctggatgctatcgctaagaaagcgatggcgcgtaaaaccggtgcccgtggcctgcgttccatcgtagaagccgcactgctcgataccatgtacgatctgccgtccatggaagacgtcgaaaaagtggttatcgacgagagcgtaattgatggtcaaagcaaaccgttgctgatttatggcaagccggaagcgcaacaggcatctggtgaataattaaccattcccatacaattagttaaccaaaaaggggggattttatctcccctttaatttttcctctattctcggcgttgaatgtgggggaaacatccccatatactgacgtacatgttaatagatggcgtgaagcacagtcgtgtcatctgattacctggcggaaattaaactaagagagagctctatgaatcctgagcgttctgaacgcattgaaatccccgtattgccgctgcgcgatgtggtggtttatccgcacatggtcatccccttatttgtcgggcgggaaaaatctatccgttgtctggaagcggcgatggaccatgataaaaaaattatgctggtcgcgcagaaagaagctagtacggatgagccgggtgtaaacgatcttttcaccgtcgggaccgtggcctctatattgcagatgctgaaactgcctgacggcaccgtcaaagtgctggtcgaggggttacagcgcgcgcgtatttctgcgctctctgacaatggcgaacacttttctgcgaaggcggagtatctggagagcccgaccattgatgagcgggaacaggaagtgctggtgcgtactgcaatcagccagttcgaaggctacatcaagctgaacaaaaaaatcccaccagaagtgctgacgagcctgaatagcatcgacgatccggcgcgtctggcggataccattgctgcacatatgccgctgaaactggctgacaaacagtctgttctggagatgtccgacgttaacgaacgtctggaatatctgatggcaatgatggaaagcgaaatcgatctgctgcaggttgagaaacgcattcgcaaccgcgttaaaaagcagatggagaaatcccagcgtgagtactatctgaacgagcaaatgaaagctattcagaaagaactcggtgaaatggacgacgcgccggacgaaaacgaagccctgaagcgcaaaatcgacgcggcgaagatgccgaaagaggcaaaagagaaagcggaagcagagttgcagaagctgaaaatgatgtctccgatgagcgcagaagcgaccgtagtgcgtggttatatcgactggatggtacaggtgccgtggaatgcgcgtagcaaggtcaaaaaagacctgcgtcaggcgcaggaaatccttgataccgaccattatggtctggagcgcgtgaaagatcgaatccttgagtatcttgcggttcaaagccgtgtcaacaaaatcaagggaccgatcctctgcctggtagggccgccgggggtaggtaaaacctctcttggtcagtccattgccaaagccaccgggcgtaaatatgtccgtatggcgctgggcggcgtgcgtgatgaagcggaaatccgtggtcaccgccgtacttacatcggttctatgccgggtaaactgatccagaaaatggcgaaagtgggcgtgaaaaacccgctgttcctgctcgatgagatcgacaaaatgtcttctgacatgcgtggcgatccggcctctgcactgcttgaagtgctggaaccagagcagaacgtagcgttcagcgaccactacctggaagtggattacgatctcagcgacgtgatgtttgtcgcgacgagcaactccatgaacattccggcaccgctgctggatcgtatggaagtgattcgcctctccggttataccgaagatgaaaaactgaacatcgccaaacgtcacctgctgccgaagcagattgaacgtaatgcactgaaaaaaggtgagctgaccgtcgacgatagcgccattatcggcattattcgttactacacccgtgaggcgggcgtgcgtggtctggagcgtgaaatctccaaactgtgtcgcaaagcggttaagcagttactgctcgataagagtttaaaacatatcgaaattaacggcgataacctgcatgactatctcggtgttcagcgtttcgactatggtcgcgcggataacgaaaaccgtgtcggtcaggtaaccggtctggcgtggacggaagtgggcggtgacttgctgaccattgaaaccgcatgtgttccgggtaaaggcaaactgacctataccggtagcctcggcgaagtgatgcaggagtccattcaggcggcgttaacggtggttcgtgcgcgtgcggaaaaactggggatcaaccctgatttttacgaaaaacgtgacatccacgtccacgtaccggaaggtgcgacgccgaaagatggtccgagtgccggtattgctatgtgcaccgcgctggtttcttgcctgaccggtaacccggttcgtgccgatgtggcaatgaccggtgagatcactctgcgtggtcaggtactgccgatcggtggtttgaaagaaaaactcctggcagcgcatcgcggcgggattaaaacagtgctaattccgttcgaaaataaacgcgatctggaagagattcctgacaacgtaattgccgatctggacattcatcctgtgaagcgcattgaggaagttctgactctggcgctgcaaaatgaaccgtctggtatgcaggttgtgactgcaaaataatgacctcgcgcaaaatgcactaataaaaacagggctggcaggctaattcgggcttgccagcctttttttgtctcgctaagttagatggcggatcgggcttgcccttattaaggggtgttgtaaggggatggctggcctgatataactgctgcgcgttcgtaccttgaaggattcaagtgcgatataaattataaagaggaagagaagagtgaataaatctcaattgatcgacaagattgctgcaggggctgatatctctaaagctgcggctggccgtgcgttagatgctattattgcttccgtaactgaatctctgaaagaaggggatgatgtagcactggtaggttttggtacttttgccgttaaagagcgtgctgcccgtactggccgcaacccgcagaccggtaaagagatcaccatcgctgctgctaaagtaccgagcttccgtgcaggtaaagcactgaaagacgcggtaaactaagcgttgtccccagtggggatgtgacgaagttcaagggcgcatctactgatgtgccttttttatttgtattcggtgactttctgcgtcttgtgggctgacaattgcccccgtttcttgtcacaataggcctttgcgcgcatcgatacgttgcgtgaggtacacagtcatctacagcggagtgttgttacaccatgatggacagcttacgcacggctgcaaacagtctcgtgctcaagattattttcggtatcattatcgtgagcttcatattgaccggcgtgagtggttacctgattggcggaggcaataactacgccgcaaaagtgaatgaccaggaaatcagccgtgggcaattcgagaacgccttcaacagcgagcgtaatcgcatgcagcaacagctgggcgatcaatactccgagctggcagcgaacgaaggctatatgaaaaccctgcgtcaacaggtgctgaatcgtctgatcgacgaggcgctgctggatcagtacgcacgtgagctgaaactgggtatcagcgatgagcaggttaaacaggcgattttcgcgaccccagccttccaggttgacggcaaatttgataacagccgctataacggtatcctcaaccagatggggatgaccgccgatcagtacgcccaggcgctgcgtaaccagctcactacccaacagctgattaacggcgttgccggtaccgattttatgctgaaaggtgaaaccgacgagctggcggcactggtcgcgcaacaacgcgtggtgcgtgaggcgactatcgatgttaacgcgctggcggcgaagcagcctgtgaccgaacaggagattgccagctactacgaacaaaacaaaaacaatttcatgacgccggaacaattccgcgtgagttacatcaagctggatgccgcaacgatgcagcaaccggttagcgatgcggatatccagagctactacgaccagcatcaggatcaattcacccagccgcagcgtacccgctacagcatcatccagaccaaaactgaagatgaagcgaaagcggtacttgatgagctgaataaaggcggtgattttgctgcattagccaaagaaaaatctgccgatattatctctgctcgtaacggcggcgatatgggttggttagaagatgccactatcccggacgaactgaaaaatgctggtctgaaagaaaaaggccaactgtctggtgtcatcaaatctagcgtcggtttcctgattgtacgtctggacgacattcagccagcgaaagtgaaaagcttagacgaagtacgtgacgacattgcggcgaaagtgaaacacgaaaaagccctcgatgcgtactacgcgctgcagcagaaagtgagcgatgcggcaagcaacgacaccgagtctctggccggtgcagagcaagctgccggcgttaaagccactcagacgggttggttcagcaaagataacctgccggaagagttgaacttcaagccggttgccgacgctatctttaacggcggtctggtaggtgaaaacggcgcgccgggcatcaactctgacatcatcaccgtagacggcgaccgcgcattcgtgctgcgcatcagcgagcacaaaccggaagcggtgaaaccgttggcagatgttcaggaacaagttaaggcattggttcagcacaacaaagctgaacaacaggcgaaagtggatgctgagaaactgctggttgatttgaaagccggcaaaggtgcggaagctatgcaggctgccggtctgaaatttggcgagccgaaaaccttaagccgttccggtcgtgacccgattagccaggcggcgtttgcactgccactgccagcgaaagacaaaccgagctacggtatggcgaccgatatgcaaggtaatgtggttctgctggcgctggatgaagtgaaacaaggtagtatgccggaagatcagaaaaaagcgatggtgcagggtatcacccagaacaacgcacaaatcgtctttgaagctctgatgagtaacctgcgtaaagaggcgaaaatcaaaattggcgatgcgctggaacagcaataatcctgaagccgcctcgcaaaaaaatgcgttgcagctgtaacaagaaaaggtcgctttcgcggccttttccatttctgaacattgccatttgtttactgttttcactgccgttaaggtgattccactgttaacaaacaaggagaaaacagtatgaaacacggaattaaagcactgctcattaccctgtccctggcctgtgccggaatgtctcatagcgcgctggcggcagcttctgtggcgaaaccgacggcggtagaaaccaaagcggaagctcctgcagcacaaagtaaagcagcagtaccggcgaaagccagtgacgaagaaggcacccgggtcagcattaataatgccagcgcggaagagctagcccgcgcgatgaatggcgttggcctgaagaaagcgcaggcgattgtcagttatcgcgaagagtacggtccgtttaaaactgtggaggatctaaagcaggtgccggggatgggcaatagcctggtggaacgtaatctggcggtattaaccctgtaattaatttgcatagtggcaattttttgccagactgaagaggtcataccagttatgacctctgtacttataacaacaacgtaaggttattgcgctatgcaaacacaaatcaaagttcgtggatatcatctcgacgtttaccagcacgtcaacaacgcccgctaccttgaatttctcgaagaagcccgctgggatgggttggaaaatagcgacagttttcagtggatgacggcccataacatcgccttcgtcgtggtcaatatcaatattaactatcgtcgcccagcggtattaagtgacctgttaactattaccagtcagttgcagcaattaaacggtaaaagcggcatcttaagccaggtcattacactggagccggaagggcaggtggtagcggatgcgcttattacgtttgtttgtattgatcttaaaacgcagaaagcattagctctggaaggggaattgcgcgaaaagctggagcagatggttaagtaaacgttttgtggtgccggatgctcaagccgcatccggcgacacccggaataattacctcaacccggttttctgcttcatcgctgccatcaccgtcggtttatcggccagataatgattcaaaccgttggcgcgtaaattacatgccgcacaatgaccgcaaccgtcgcctttaaagccgttatagcaggtcaacgtttcgttacggactaaatccagtttgccgtaataatctgccagcgcccaggtttccgctttatcaatccacatcagcggcgtttcaaaacgaatatctttcgccatgcccaaactgacggcatggtttagtgctttcacaaactcatcgcggcaatccgggtagccggagaaatccgtttcgcagacgccagtaattacggcttctgcttttacctgatacgcatatattgccgccagcgtcaggaacaaaatattacgccctgggacaaacgtattcgggataccatcggcttcaggttcataatcaggcaccggaatgctgtcacgcgtcaggctactgaccgccagctcgttgagcagggtgacatccagcaccttatgcgcgcgtgcccccagtttcagcgccagttcgcgtgccacgtcgatttctgcgcgatgccgctgaccgtaatcgaacgtcacgcaatggacttcatcatattgttgtaatgcctgcaccagacaggtggtggaatcctgacctccactgaacacaacgacagcacgtttcatagataatcctgcttgaacaataaaagcgttatggtaacgcctgcgattaacccggaccagctattcattggcttggcgcgggaagccaggcttcggtaaattcaaaccagccgcgcggtgtcagtcgcacaccgttcacgccgggaggggcactaatgcgatagtgatagttgaacagcggcgtcagcgtcgcatctgtcattaactggctaaaaaccgctttcagggcattaaatcggttttcttcatcaggcattatttgcacggcatccagtgtgctttgtagatgtgcgtatgctggagcgtcgaaaacatgtggccacagcggatcgcagcgcagccattgctccagagtatattccggtgcttcgccaattaatctgtcgcccatcatgaggtctgcgtgtgcctgtagggtcgtgtcgtcccagttttttgcgttatgaaaaataattgtgagttcacagccttccgctgccagtgtcgcctgtaggcgttctgccatggtatgaagttctatcggtaggtgataaaccagcgtcaaggttttcggtagtttgacttcatccggtacctgccaatgcggaatagtccagcctggcagtaatgcatgactggcggtgatcaggttttctccgacttctaacgtttgtaataaaccggattgatgaataatggagatcacttttcgcgcctgccagagggagagtcggggacttttgcgcaacgtcaaatagcaaaaacctaaactgatgccgctactgacctggctgacccgttgcagctcctccggtttgccgatggtgatttgcacgggatgccgacaactggttcccaaatctttttcgaaaagcggcggagttatccagtactcaaccgctttaagcagcggatgacgtaaatggtaataatcatggctttccaggcgcaccagctctgctgtgaattgtgttaagcgaaaaggacccgtgccgatcagtgggaattgcggatgcgccagatggctgcaatagctcgccagccggtgcgcaagccagtaatcagggcgatgtaaaaagaaggtcagacactgcggatgggtgacttcaatacgcttcacgctaataaataattgatccagtgctggcagttgtaacagcatcaataatcgctggtgtaagtgactggcttttactgcatcgccgttatgccagtgtagggtactacgaagataaaagtcccagcgtaacccgtcagtagaggtttcccagtgatgcgctaaatcgccaatcgggcgctgagtattattatcgaagcgggtcaggccggaaaatatctgcccggcgagatgctgctcggcacggccgggcaaaaagcctggttgtagcggttcgagcgggcgatagtagggaatacgcaacgtgggtgtatcgttttgccattgtccgcccataaacggctgtaacagagtgcgcagctcacctggggccagttgcgccagctccagcacatcttgctgctttccggtttccagtgcctgttccatcatcgcattgcgtaggctttccggcgtgaccagaaagcgtaattgtccgcgctttccgcgtccactctgcgcctgccactccagccatcccgcctcctgtgcctgacgcaacagcgtacgaacatggcgttcgctgcaaaaacagcgttcggccagttcgctgacggtgacggtttgcggctttccggcggaaggttgccacagacgttgatactggttaagacggttgagcaatcgcatataaacccggaacaatattatttaactattcactattacttccgtatatatcaggtgatactcaatcaccattaaccgtgtcacagagtggagaaagaaatggctcgtctggcagcatttgatatggatggcactttattgatgcccgaccatcatttaggtgagaaaaccctctctactttggcgcgactgcgtgaacgcgacattaccctcacttttgccacggggcgtcatgcgctggagatgcagcatattctcggggcgctaagcctggatgcgtatttgattaccggcaacggaacgcgcgtgcattctctggaaggtgaacttttacatcgtgatgatttacctgcggatgtcgcggagctggtgctgtatcagcaatgggatacccgagccagcatgcatatcttcaatgacgacggttggtttaccgggaaagagatccctgcgttgttgcaggcatttgtctatagcggttttcgttatcagataatcgatgtcaaaaaaatgccactcggcagcgtcaccaagatctgcttctgtggcgatcacgacgatcttacacgcttgcagatccagctatacgaagcattaggcgagcgtgcacatttgtgtttttccgccacggattgcctcgaagtgctgccggtgggctgcaataaaggcgctgcattgacggtgctgacccaacatttaggtttaagcttgcgcgattgcatggcctttggtgatgcgatgaacgatcgcgaaatgttagtcagcgtcggtagcggatttattatgggcaatgcgatgccgcaactgcgcgcggagctcccgcatttaccggtgattggacattgccgaaatcaggctgtctctcactatttgacgcactggctggactatccacatctaccttattcccccgaataacgagatcccttccagcaccgggcaattgcccggttttttttgcgttgaatttgtcattttgtgccgtggtgtttaaaccgcacagaataaattgtcgtgatttcacctttaaaataaaattaaaagagaaaaaaattctctgtggaagggctatgttagataaaattgaccgtaagctgctggccttactgcagcaggattgcaccctctctttgcaggcactggctgaagccgttaatctgacaaccaccccttgctggaagcgcctgaaacggctggaggacgacggtatccttatcggcaaagtcgccctgctggatccggaaaaaataggcctcggcctgaccgcttttgtgctgataaaaacgcaacatcacagcagcgaatggtattgccgctttgtcacggtggttaccgaaatgccagaagtgctggggttctggcgcatggctggtgaatacgattatctgatgcgcgtccaggttgccgacatgaaacgctacgacgagttttataagcgtctggtaaacagcgtgccggggctgagcgacgtcacttccagcttcgcgatggaacagattaaatacaccacttctttacccatcgaataaatatccagaatcaggtcaggacacaacgcgtgcgattatttgctcaattaagctggtatttccgtcgggaatggcgtcgctatctcggggctgtcgccttgcttgtcattatcgcgatgctgcaactggttccgccaaaagtggttggtattgttgtcgatggcgtgacagaacaacactttactaccgggcagatcctgatgtggatcgccaccatggtgctgattgccgttgtggtttatctcctgcgttacgtctggcgggtattgctgtttggtgcgtcttatcaactggctgttgaactgcgtgaagattattaccgtcagctaagccggcagcatcctgagttttacctgcgtcatcgcaccggtgacctcatggctcgtgcgaccaatgacgtcgatcgcgtcgtgtttgccgccggagaaggggtgctgacgctggtggatagtctggtgatgggctgcgctgtgttgattatgatgtctacgcaaattagctggcagttgaccttattttccctgttgccgatgccagtgatggcgatcatgattaagcgcaacggcgatgctttgcatgaacgctttaagctggcacaggcggcgttttccagtcttaatgaccgcacccaggaaagcctcaccagtatccgcatgatcaaagcctttggtctggaagatcgccagagcgcgttatttgccgcggatgccgaagataccggcaaaaaaaacatgcgggtggcgcgtattgatgctcgtttcgacccgaccatctatatcgcgattggtatggcgaacttgctggcgattggcggcggtagttggatggtggtgcagggcagtttaacgctgggccagctcaccagttttatgatgtatttaggtctgatgatttggccaatgctggcgctggcatggatgtttaacattgtggaacgtggtagtgctgcgtacagccgtattcgcgcgatgctggcggaagcgccggtggtgaacgatggtagcgaacccgtgccggaagggcgtggcgaactggatgtaaatattcaccagttcacgtatccgcagactgaccatcctgcgctggaaaacgtcaatttcgccctgaaacccggtcagatgctgggtatctgcgggccgactggttccggcaaaagtaccctgttgagcctcattcagcgtcatttcgacgtcagcgagggggatattcgctttcatgatattcctctgacgaagttacaactcgatagctggcgtagccgcctggcggtagttagccagacgccattccttttttctgacactgtggcgaataacatcgcgctgggttgcccgaatgccacccagcaagagattgagcatgtcgcgcggttagccagcgtacatgacgatattttgcgtctaccgcaaggttacgatacagaggtgggcgagcgcggtgtgatgctttccggcgggcaaaaacagcgtatctccattgctcgtgcgttattagtcaacgcggaaatcctcatccttgatgatgcgcttagcgcggtggacggacgcactgagcaccagatcctgcataacctgcgtcagtgggggcagggaagaacggtaatcatcagtgcccatcgcctttctgcactgacggaagccagtgaaattattgtgatgcagcacggacatatcgcccagcgtggcaatcatgatgtgctggcacaacaaagcggctggtatcgcgatatgtatcgctatcaacaactggaggcggcgctcgacgacgctccggaaaatcgcgaggaggccgtcgatgcgtaactaaaaatcgcgaggaggccgtcgatgcgtagttttagccaactgtggccgactctcaagcgcctgttagcgtacggtagcccgtggcgtaaaccgctggggattgcggtcctgatgatgtgggttgcggcggcggcagaagtcagtgggccgctgcttatcagctattttatcgacaatatggtagcgaaaaataacctgccgttgaaagtggttgcagggctggctgcggcgtatgttgggctgcaactgtttgccgccgggctacattacgcgcagagcctgctgtttaatcgggcggcagtaggcgtagtgcaacagttgcgtaccgacgtgatggatgctgcgttacgccagccattaagcgagtttgatacccaacccgtcgggcaggtgatttcccgcgtcactaatgacactgaagtgatccgcgatctctacgttaccgtagtggcaactgtcctgcgcagtgccgcgctggtgggcgcgatgctggtggcgatgttcagcctcgactggcgaatggcactggtggcgataatgattttcccggtggtgctggtggtaatggtgatataccagcgttacagcacgccgattgtccgtcgtgtgcgcgcctatttggcggatatcaacgacggctttaacgaaatcatcaatggcatgagcgttatccagcagtttcgtcagcaggcgcgatttggcgaacgtatgggggaggccagtcgtagtcactatatggcgaggatgcaaaccctgcgcctcgacggttttctgctgcgtccgctgctgagtctgtttagtagcctcattctttgtggcttgttgatgctgtttggcttctccgccagcggcaccattgaagtgggcgtgctgtatgcgtttatcagctatcttgggcgacttaacgaaccattaatcgaactgaccacgcaacaggcgatgctgcaacaggctgttgttgctggtgagcgcgtgtttgaactgatggacggaccgcgccagcaatatggcaatgatgatcgcccgttacagagtggcaccatcgaagtcgataacgtgagttttgcttatcgcgatgacaatctggtgctaaagaacattaatctctctgtgcctagccgcaattttgtggcgctggtcgggcataccggcagtggcaaaagcaccctcgccagtttattgatgggctattacccgctaacggaaggtgagattcgccttgatggtcgtccattaagtagcctaagtcacagcgcgctgcgccagggcgtggcaatggtgcagcaagatccggtggtgctggcggataccttcctcgccaacgtgacgctggggcgggatatctccgaagaacgcgtctggcaggcgctggaaaccgtgcaactggcggagctggcgcgtagcatgagcgacggtatttacacgccgctgggcgagcaggggaataatctcagtgttgggcaaaagcaactgctggcactggcgcgcgtgctggtcgagacgccgcaaatcctgatccttgatgaggcaaccgccagcattgactccggtactgaacaggcgattcaacatgctctggcggcggtgcgtgaacataccacgctggtagtgattgctcaccgcttaagcaccattgttgatgccgacaccattctggtgcttcatcgtgggcaagccgtggagcagggcactcaccagcaactgctggcggcccagggacgctactggcagatgtatcaactgcaacttgcgggcgaagagctggcagccagcgtgcgtgaagaggaaagtttgagcgcctgaatagcgcaatatttcatcgttggtgcaaaaatgtaacgcactgtgcactgtcatagtgcgttttcattttcaaacttcttaacttcctgctctctttctcgtttttcatttctggcacaccgcttgcaataccttcttcgtgtagcagaaccattaccgaattctgaccggaggggatctatgaagctggtgaccgtgataatcaaaccattcaagctggaagacgttcgtgaagcgttatcttccattggtattcagggcctgaccgtcaccgaagtgaaaggtttcgggcgtcagaaagggcatgccgagctgtaccggggggcggaatacagcgtcaatttcctgccaaaagtaaaaattgatgtggcgattgctgatgaccaactcgatgaagtgatcgatatcgtcagtaaggcggcttacaccggaaaaattggcgacggcaaaatcttcgtcgctgaattgcaacgcgtcattcgtattcgtaccggcgaagccgacgaagcggcgctgtaatctctggcacacagcaacaggaacgaaaaatgaagatagcgacgataaaaactgggcttgctagtctggcgatgcttccgggactggtaatggctgcacctgcggtggccgataaagccgacaatgcgtttatgatgatttgtactgcgctggtgctgtttatgactattccggggattgccctgttttacggtgggttgattcgcggcaaaaacgtgctgagcatgctgacgcaggtgacggtgacatttgcactggtctgtattctctgggtggtttacggttacagcctggcgtttggtgagggcaacaacttcttcggcaacattaactggttgatgctgaaaaacatcgaactgacggcggtgatgggcagcatttatcagtatatccacgtggcgtttcagggaagctttgcctgcattaccgtcggcttgatagttggggcgctggcggaacgaatccgcttcagtgctgtgttgattttcgtggtggtatggctgacgctctcttacattccgattgcgcatatggtgtggggcggtggtttgctggcttctcacggtgcgctggatttcgcgggtggcaccgtggtgcacattaacgccgcaatcgccggtctggtgggcgcgtatctgataggaaaacgcgtgggcttcggtaaagaggcgtttaaaccgcacaacctgccgatggtcttcaccgggactgccattctctatatcggttggtttggctttaacgccgggagtgcgggcacggcgaatgaaatcgcggcactggcatttgtgaatactgtggtcgcaacggcggcggcaattcttggctggatcttcggtgaatgggcgctgcgtggtaagcctagtctgctgggggcgtgttctggcgcgattgccggtctggtcggcgtgacgccagcctgcggctacattggggttggcggcgcgttgattatcggcgtggtagctggtctggcgggcttgtggggcgttaccatgctcaaacgcttgctgcgggtggatgatccctgcgatgtcttcggtgtgcacggcgtttgtggcattgtcggctgtatcatgaccgggatttttgccgccagcagcctgggcggcgtgggcttcgctgaaggtgtgacgatgggccatcagttgctggtacagctggaaagcatcgccattacgatcgtctggtccggtgttgtggcatttatcggctacaaattggcggatctgacggttggtctgcgtgtaccggaagagcaggagcgagaagggctggatgtcaacagccacggcgagaatgcctataacgcgtaacaagcactgcaaaaaacagccggacggttttcacctccggctatttttttaattgtgattacgcatcaccccttcctgaacggtgctggcaaccagtacgccgtcttgggtataaaactcaccgcgcacaaagccacgtgcgctggacgcgctggtgctctccacgctatacagcagccattcattcaaattaaacgggcgatggaaccacatggaatggtcaatggtggcaatctgaatccccggttcgagaaaaccgatgccgtgcggctgtagagctaccggcaggaagttaagatcagaagcgtaaccgagcagatactgatgaacgcgcaggtcatccggcacgctaccatttgcgcggatccacacctgacgatgtggttctgcgacgtgacctttcagtgggttatgaaactccaccggacggacttccagcggacgatcgcagatgaatttatctttcagcactggcggcagcaggtgcgccaggctttgggcgatttgcgtttcgctagggaggccatcaggcgctggcgcggacggcattgttttttgatgttcgaaacccgcttctggtgcctggaaagaggcagtcatataaaaaatcggtttgccgttttgaatagcagcaacccggcgggcgctgaagctgttaccgtcacgcagcgtttcgacatcataaataatcggcttcttactatcgccagggcgaagaaagtagctgtgaaagctatgtaccagccgctcttcagggacggtctcttttgcagcatacaaggcctgacccacgacctggccgccaaacacctggcgtaaacctaaatcttcactctggccgcgaaagagtccttcctcaattttttccagatttaacaatgtcagtaaattttttagcgcctgactcatataactctccagtaacaaagctgccgcagcaagccaaagtgagttgagtataacgcaaatttgctactggtccgatgggtgcaatggtctgaattacgggctaattacaggcagaaatgcgtgatgtgtgccacacttgttgacgttactattttgttaaccactcttccggcgaggaaagttagcccgctggtgcattgataataaggagaaatgaatgaaactcgtgcacatggccagtggtttagcggttgcgattgcgttggcggcttgcgcagataaaagcgcggatattcagacgccagcaccggctgcaaatacgtctattagtgcaacacaacaaccagctatccagcaaccgaatgtctccggtaccgtctggatccgtcagaaagtcgcactgccgcctgatgctgtgctgaccgtgacactttctgacgcgagcttagccgatgcaccgagtaaagtgctggcgcagaaagcggtgcgtactgaaggtaaacagagtccattcagctttgttctgagttttaacccggcagatgttcagccgaacgcgcgtattctgttgagtgcggcgattaccgtgaatgacaaactggtatttatcaccgataccgttcagccggtgatcaaccagggcggaactaaagccgacctgacattggtgccggtacagcaaaccgccgtgccggttcaggccagcggtggcgcaacgactaccgtacctagcactagtccaactcaggtgaatccgtctagcgcagttccagctcctacgcaatattaagcgacgttaaccctctccgcccggagagggttagtagttccagcgataacgctgcaagtcgatttgcccgcttccgcttaccatcacaccttctgccagtaatgcctgtcgctgacgctgtaaatccggtccggttaggctaattgtgccgtggcgattaaccacccggtgccagggtaaggtgctgccttcagggagacgctttaacacaccgcccacctggcgcgcggcgcgggggcttcccgccagtttcgccacatcaccgtaagtggtgacatagccttcgggaatagcggcgacgatttgccagacgcgttggggaaaactatcttctttttccatcttttcttcctgaggtaatttttcagcataatctggaaaaacgccgctgtgaagtcgcattgcgcaagaaaccagcatctggcacgcgatgggttgcaattagccggggcagcagtgataatgcgcctgcgcgttggttctcaacgctctcaatgggggctctgttggttctcccgcaacgctactctgtttaccaggtcaggtccggaaggaagcagccaaggcagatgacgcgtgtgccgggatgtagctggcagggcccccacccatttctgcctcccaccgtttcgtcaaaaaatcccaacatggctaaactttaaccacaactgacgtcgcaagaattgtctggctgcgcagtacgcttcggaggtatgtctgatgaagtatgttgatggttttgtggttgccgttcctgccgataaaaaggatgcctatcgggaaatggccgctaaggctgcgccattgtttaaagagtttggcgcgcttcgtattgtcgaatgctgggccagcgatgtaccggatggcaaagtgaccgattttcgtatggcggtgaaagcggaagagaatgaagaggttgtctttagctggattgaataccctagtaaagaggtccgcgacgctgctaatcaaaagatgatgagcgacccacggatgaaagagttcggcgagtccatgccgtttgacggcaagcgaatgatctatggcggattcgagagtatcatcgacgaataagtagcgtgacgggctgtgcggcgtgccgtcagcccaaaaattcacaaatgttgctcggcccagcgtaagaaatcttctttcggtaatgccttgctgtagagccagccctgaccgtagtgcacgccatgctggcgtaaccactcttcttgtttactggtttcgattccctccgctaccattttcagtttcagtgtttttgccatttcgatgatatgcggcgtgacatttttatattccagcgcatcaacgaaagatttatcgatcttcagaatgtcgacatccagatcctgtaaataacttaaactactataccccgtaccaaaatcatcaagataaatttcatggcccgcctcccggtagcgagaaattatcggggcgctggttttcggatcggcaaactcgcgttcagtgagttcaagcgcgatctgtctgggattaacctgatagtgattgatcatgtcacgcagcaattgcgggattttttcgctggtgagcacgggggattcaagattgatgctaatatgctgctgtggatgctgacgcagccagtcgcccatatcttcaaagacgcttcttataatcagtagcgtcaatggctcagaaaggcccgtttgctgtgccagcggaataaaactatctggactcaaccaactaccgtctgtctgcggccagcgcgccagtgcctcagcaccgacaattttgccattggctaaggagacaatcggctgatagtgcacgcaaatatcacgattttcgatagcatcctgcagccgatgatgcggactctgaatacggcgcaaaatacgcagcacaaacatcgctgccagcaggccaatcaccaacccgagcggtaaccaaataaagacttgccgatgccagcctttctgcaacattttcgtactagcccatgtgatgatgctaatattcatctccggtaagggcaggatatcgtaaatgattccattattttcgatatgctcaccgggtgttttttgtagcctggtaataattccctgagcaatttcatcgctgctggttatgacaacgttatgggcattgccaataatggcggcatcaatttgccaactgctatagggaatgacatcaataaaggaagcggggtcgatcatgacgacataatgtgccgttcccatggcgaccatgtaacggataatgcctaaatcgttatggcttgttaaccagacacgataaccatctttgctaattttacctggctcggggaaggtatcgggcggactttcatgctccagagagctacactggggaacgttgttatcgatataagccacttcctgaatatagcgataactgtaagatacccgacgcatttccatgagatgggcttcgctacaggcagcgccttgccatctttccagctcctgcagcgcatctttcccttgtgtcgccaccttattggctcgaatagcgacgcgggaggaataggtatccagctcttcaataaagcttgtttctacctgctgatgggccagccagatgcttaagccgacaggcagcaatacactaagaatcagtactccgctaataaggccgaccagatgtcgtgttctcaccagcatatccttattaacacagtgtagggaaagtatatctgattgtggaaaaaggctggctggagataaggaggtagagctggtatttcatgaagtgatgggtggaaacgatcattgtcatttgaccaggcgcagagctttacgcctggtatgtaaccctaacttaagatgtactttcggcgcgagcgagggtaaaaatatcgtaaaaagacagttcacctttacggacgatcattttttgcagttgttccttatgaacatccgcgacacgcggagagttcaagatggcttcaaccagcgcggcaggtacaaagcgcgtgttgtaccattcgccgttatagcaaacgcggaaatccagcacgtcgatatcttcatagcggtagcgtgggtagacatcgaaaaagaagaaaccattaagcaggataaataatacaaccagtagccagacagagccactcagcgtttcggactgcaacatcaccgccagggtggcaaaaaaagcaacgtacataccgataaacagccccggatgtttacggataaaactgatactaaagcggggtttgttgtcgcgtttttcgcgggtattcagagactcaatcgtttcggtcagcaggcgttgtatttcggtcatcgtttgccttcgtggtatctgcaactttccagggaacaccctattttaacgtgggaatagtagaggggaagtaacagatctaccacaattttgcataacagttgcgaaaaaccgattacaattttttaattattctggctggattaccgcccacgacaacgttgtccgggacatcttttgtgacaactgcaccactggctaccacgacgttatcaccaatggtcacaccagggttaatgaccgcgcgtccgccaatccagacgttattaccgatggtgacgggtttccccagttcagcaccgctattacgtgctacagggtcgatgggatgtgttgccgtgtagatatgaacgcctggtgccaacatacagttatcaccgatgcgaatagggcagacatcaagcatcacgcaatcgaagttggcgaaaaaattattaccgagaaaaatgttatagccatagtcacagcgaaacgttggctcaatataagcctctgtcacctgaccgaatagatcagcgagaatttgctggcgtaatgtgtgctcttccgccagggaatgattgtatcggtgaataagctgacgagcgcgcaggcgatcgcgagataacgtctcatctgcgctgcgatacaactcaccagcaatcatcttttctttttctgtgctcattactgacctccggttgctgaaaatgcggcaacacagtaagacgaaaagtcagtgaagagaacgttcccattacatctgtgtgataaagatcacatagggtatgtcttcatggcgaaaaagtataaaattcttaataaacagccggttatagctccgaaagcgaattatttattagcgaataaatttccatacactggaagggatcttgtcgtacagtttattcatggtcaattcggcgaggcggtgatctgcggcactgtaaaataccgccagttcattatcacttaattcgtatttatttttctcgataacacgctccagcgtgtcaattgtctggcaacgacgtaaacgcattaaataatcggttttcgttaaaggtttttcggacatacttctacctatggttgtaataattttaacaagataaactcgcaggattctctttcgtcgcattgacaaaacaacggaatagtcgattaccactcttccgccatttctgaagatcctgcatattaataccataactactgaacaacataaaggtgtcatccagatattcgtcgatctgctcaatgagcttattgtcttcattatacttaattttgtaattaagtgcgaaggtcgcaatatgctcaatcagttcattcaactggaggttgatcgcgctggttgggtcgtttacccagccatgattgctttcttcaaggtttgcaaggcagtcatgatacagggtttcacagagaaacttaagctgtgcgatatcatgtcttttgggactgtattcatccataacgcgtccccttcttagcggttgaactaacggacacctttcgggatggaaaaaacttactgacctggacttgccctctcgtttgttagcttaactataagccactctttgcaggttttcatcgcattattacgaaaaattacaattaggaaggaagcgggacaggactcactttttcatactagcactaacccgcagcaggtaaaagcagtttgctcgaactattcataacatttcaggattatcgccagatgaaattggtgacactaataccaggattgctctgaatatgacgtaataaccgaggaatgaataaagaattaccgcaaataattaagaatagcctctaaatgattatggattattaaatctattagcgctacttaatataaattaactaacaatcagtattttttatgaattttatccgtggttaatactggttttcgtatgagatcctgagttggtggttcaattactccttaatgttcgtaggttatgcataaaaaaggccgcttacgcggccttagtgattacacgttgtatcaatgatgatcgacagtatggctgtgctcgatatcttcattcttgcggctaaagcggcggcgaaccaccacaaagaataccggaacgaagaagattgccagtaccgttgcggtcaccatcccgcccattacaccggtacctactgcgttctgcgcgccggaaccagcaccagtactgataaccagcggcataacgccgaggataaacgccaggctggtcatcaggatcggacgtaaacgcatccgcaccgcatcaagcgtcgcttcaatcagacctttaccttctttatccatcaagtctttggcgaattcgacgataaggatcgcgttcttcgcgctcaacccaatggttgtgagcaggcctacctggaagtaaacgtcattggtcaggccacggaaggtggcagccagcaacgcaccgataacccccagcggaacgaccagcataacggagaacggaatgctccagctctcgtacagcgccgccagacacaggaacacgacaatcaagctaatcgcgtacagactaggtgcctggttgccggagagacgttcctgataggacatccccgtccagtcatagccaacaccggtaggcagtttgctcgccagttgttccatcagctccattgcttcaccggtacttttacccggtgccgcctggcctaagatttccatggatggcaggccgttgtaacgttccagacgcgggctaccgtactcccaacgagaagaggagaacgcgctgaatggcaccatctgaccatcagcagcacgaacataccagtcgccgatatcatccggcagcatacggtatttcgcttcactcatgacataaactttcttcacacgaccgcggtcgataaagtcgttcacatagctgccgccccatgcagcgcccagagtggtgttaatgtcgttgatagaaacacccagcgcctgcgctttttcctggtcgatatcaatcttaaactgcggggtatcttccagaccgtttggacgtacgctggtcaacatatcagggtgcttcgctgcttctgcaagcaactggttacgcgcctgagtcagtttttcgtgaccaaggccagcctggtcaatcagctcaaagtcaaagccggttgcagtacccagttccacgattgcgggcaggttaaaggcgaaaaccatcgcatctttgatttggctgaaagcgcgtgttgcacgcatggtaatcgcttcaactttgttttcttcgcccggacgatcggcccagtccttcaaggaaacgaacgcaataccggtattctgaccacgtcccgcaaagccgaagccgttaacggcgaacacgctctcaacgttgttcttttctttggtcagatagtaatgcgttacctcattgagcactttctgtgtacgttcctgcgttgcacctgctggcagctgaaccatggtcataaacacgccctggtcctcatctggcaagaaggagcttggcagacgcacgaacagataggccatgccgaccacgatgatcagatacagcaccaggtaacgccccgtactgcgcagaataccgcctacgctgtcggtgtagtggtgcgtgctcttctcgaacatgcggttaaaccagccgaagaagccttttttaccttccccgtgatcgcctttggcaatcggtttcagcatggtggcacaaagagctggagtcaggatcaacgccaccagtacgctcagcgccattgcactaacaatggtaatagagaactgacgatagatagcaccagtagaaccgccaaagaaggccatcggtacgaataccgcgctcagtaccatcgcgataccgaccagagcgccctgaatctgccccatgctcttacgggtagcttcttttggcggcaaaccttcttccgccataacacgctcaacgttttctaccacaacgatggcgtcatccaccaacaggccgatggcgagcaccatcccgaacattgttagcgtgtttatgctgaagccaaaggcggcaaggacggcaaaggtcccgagcaataccaccggtacggcaatggtcggaatcaacgtcgcgcggaagttctgcaggaacagatacataaccaggaacacgaggatgatcgcttcgaccagcgttttaaccacttcgtgaatagagattttcacgaacggcgtggtgtcgtatgggtaaacaattttcagaccgctcgggaagaacggttccatcttcgccagttcagcacggattgccgcagcggtatccagcgcgtttgcaccggtcgccagcttgatccccagaccggaagccggttggccgttaaactctgcgatgatgtcgtagttctcaccacccagctcaatcttcgcgacgtcacgcagcagcacgcgggaaccatcctgattcactttcagcaggattttgccgaactcttcagtagaggtcagacgcgtctgagcaataatagaggcgttaagctgttggcctttcaccggcggcgtaccaccgagctgacccgccgcaacctgggcgttctgcgctttgatggcggtaatgacatcaaccggcgttagctggaatttgttcagctcattcgggttcatccagatacgcatcgcgtactgactaccgaacaactgaacatcacccacgccgctcgtacggctgatggcatctttcatattcgccgccacgtagtcggagatatcctcctgcgtcatggtgccatcggtgttgataacgccgacaaccatcaggaagctgctggaacttttctcaacgctcaccccttgctgctgaacttcttgcggcagcaacggcatcgccagctgcagtttgttctgcacctgaacctgcgcgatatccgcatcagtaccagactcaaaggtcagggtgatctgcacggtacccgtggagtcactgttagaggacatgtacatcaggttatcgataccgttcatattctgttcgataacctgtgtcaccgtgtcctgcactgttttcgcatcagcgccggggtaggaggcggagatcgttactgccggcggtgcaatcgtaggatattgcgccaccggcagtttgaggatcgccagcccccctgccaacatgatgataatggcgatcacccacgcaaaaatcgggcgatcgataaagaaattaggcatgtcttaacggctcctgtttaagttaagacttggactgttcaggctgagcaccgcttgcggcttgctggttattatcagcggtaacttcttgtgcttttacctggacaccaggacgcactttctgcagcccacttattactacgcgatcgcctgctttcagaccttctgtcaccagccacttatcgccaatagcctggcttgcaacgatcggacgggtttccactttgtcatccgcgccaactaccagtacggtggcatcgccacgcggcgtacgggttacgccctgttgcgggactaaaatagcgtttggattaagcccttcttccagacgtgcgcgcacgaacatacccggcagcagagtgtgatccgggttcgggaagatagcgcgtagggtgatagacccagtggtctgatcaacggtaacgtcagagaattccagcgtaccgtcctgcgggaacttaatgccgtcactggtgatcagactcactttggctttgccgttctcttgtttcagcgtgccattcgccagttcctgtttcaggcgcaggaagtcgttgctggactgggtcacatcaacgtagatcggatcaagttgctgcacggttgccagcgcagtcgcctgaccgttctgtaccaatgcgccttccgtcacgttgctcttaccaatgcgaccgctaatcggagaggtgactttggtgtaagccagattgatccgcgcagtttcaacggcagctttcgccgcagttaccgcagcattcgcctgttgcgcatcagccagagcctgatcgtactcttgcttactgatgtactgagtaccgagcagtttctgataacgattcaccgtcaattgcgcgatattggctgcagcctgggctttcgccagatcacctttcgcactgtcgtatgtcgcctgataggtcgcaggatcaatctgatagagagagacacctgcttcgatgtcgctaccttctttgaaattacgcttcaggataatcccgctaacttgaggacgaacttctgcgatccggtaggcactggtgcgacccggaagctcggttgtgatctgcagaggttcagttttgactgttactacgccaacggcgggcatctgctggccaccttgttgggcctgtttgtcgtcacatcctgttagggctaagctgccactgagcatcagaacgaccgccagaggcgtaaaccctctgtttttgttcatatgtaaacctcgagtgtccgatttcaaattggtcaatggtcaaaagttaataaacccattgctgcgtttatattatcgtcgtgctatggtacatacattcacaaatgtatgtaaatctaacgcctgtaaattcacgaacatatggcacgaaaaaccaaacaagaagcgcaagaaacgcgccaacacatcctcgatgtggctctacgtcttttcagtcagcagggggtaagttccaccagcctgggcgagattgcaaaagcagctggcgttacgcgcggtgcaatctactggcattttaaagacaagagcgatttgttcagtgagatctgggaactgagtgaatccaatattggtgaactagagcttgagtatcaggcaaaattccctggcgatccactcagtgtattaagagagatattaattcatgttcttgaatccacggtgacagaagaacggcgtcgattattgatggagattatattccacaaatgcgaatttgtcggagaaatggctgttgtgcaacaggcacaacgtaatctctgtctggaaagttatgaccgtatagaacaaacgttaaaacattgtattgaagcgaaaatgttgcctgcggatttaatgacgcgtcgcgcagcaattattatgcgcggctatatttccggcctgatggaaaactggctctttgccccgcaatcttttgatcttaaaaaagaagcccgcgattacgttgccatcttactggagatgtatctcctgtgccccacgcttcgtaatcctgccactaacgaataaccctgaatctgactccaggatttttcctggacattttcgtcgttgctattctggttcactgcgtcgtgatattcttgcggtttgactttttcaggtcgttcttcaggttcagaaaccttcattcatcatgactatgttccagtattacaaacgaagtcggcattttgtttttagtgcatttattgcttttgtttttgtcttgttatgccagaacacggcgtttgcgcgggcgagtagcaatggtgatctgccgacaaaagcggacctgcaggcgcaacttgacagtctaaataaacaaaaagatctttctgctcaggacaaactggtgcagcaggatctgacagatacattagccaccctcgataaaatcgatcgcataaaagaagagacagttcagctacggcaaaaagtcgctgaagcgccggaaaaaatgcgccaggcgaccgcggcgttaacagcacttagcgatgtcgataacgacgaagaaacgcgcaaaattctgagcacgctgagcttgcgccagctggaaactcgcgttgcccaggcgctggacgatttgcaaaacgcacaaaacgatctggcgtcttataacagccagctggttagcttacagacgcagcccgaacgcgtgcaaaatgcgatgtataacgctagccagcagctgcaacaaattcgcagtcgtctggatgggactgatgtcggcgagacagccttacgtcccagccagaaagtgttaatgcaggcccagcaggcgttgctgaatgcggagattgaccagcagcgtaaaagcctggaagggaacaccgtcttgcaggataccttgcaaaagcaacgtgattacgtgacggcgaacagcgctcgtctggagcaccagttacaactgttgcaagaagcggtaaacagcaagcgcctgactttaaccgaaaaaacggcgcaggaagccgtctccccggatgaagccgcgcgtattcaggctaatccgctggtgaagcaggaactggaaattaaccagcagttaagtcagcgtctgattaccgcgactgaaaacggtaatcagttgatgcagcaaaacattaaagtcaaaaactggctggagcgggcgctgcaaagcgaacgcaatattaaagagcagattgccgtcctgaagggcagcctgctgttgtctcgtatcctttaccagcaacaacaaacgctgcccagcgcggatgaactggaaaacatgaccaaccgcatcgcggatttgcgtctcgaacagtttgaagttaaccagcagcgtgatgcactcttccagagcgatgcgttcgtcaacaaactggaagaaggtcacaccaacgaagtcaacagcgaagttcacgatgcgttattgcaagtggttgatatgcgtcgcgaattgctggatcaactcaacaaacagttgggtaaccagctgatgatggccattaacctgcaaatcaaccagcagcagttaatgagtgtgagcaaaaacctgaaatccatcctgactcagcaaatcttttgggtgaacagtaaccgtccaatggactgggactggatcaaagcgttcccgcaaagcctgaaagatgaatttaagagcatgaaaatcacggtgaactggcaaaaagcctggcccgccgtttttatcgctttcctcgctggtttgccgctgctgttgattgccgggctgatccactggcgtctgggctggctgaaagcgtatcaacaaaaactggcttccgctgtgggttccctgcgtaacgacagccagctcaacacaccaaaagcgatccttatcgacctgatccgtgcgctgccggtgtgcctgattattctcgcggttggcctgattctgttgaccatgcagctcaacatcagcgaactgctatggagcttcagcaaaaaactggcgatattctggctggtgtttggcctgtgctggaaggtactggagaaaaacggcgttgccgtacgtcacttcggcatgccggaacagcagaccagccactggcgtcggcaaattgtccgcatcagtctcgcattgctgcctatccatttctggtctgtggtggcagaactttccccgctgcatctgatggatgatgtgctggggcaagcgatgattttcttcaacctgctgctgattgccttcctggtatggccgatgtgccgcgaaagctggcgtgataaagagagccacaccatgcgactggtcaccattaccgtgctgagcataatcccgattgcgctgatggtgctgactgctacaggctacttctacactacgctgcgtctggcaggacgctggattgaaaccgtttatctggtgatcatctggaacctgctgtaccagacggtactgcgtggcttaagcgtagcggcgcggcgtatcgcctggcgtcgtgcgctggcgcgtcggcagaatctggtgaaagagggcgcagaaggtgctgaaccgccggaagaacccaccattgcactggagcaagttaaccagcagacgctgcgtattaccatgttgctgatgtttgcgctgttcggtgtcatgttctgggcaatttggtccgatttgatcaccgtgttcagctatctcgacagcatcacgctctggcattacaacggcactgaagctggcgctgcggtggtgaaaaacgtcaccatgggcagtctgttgtttgcgattatcgccagtatggtggcctgggcgttgattcgcaacctgcctggtttactggaagtgctggtgctcagccgactgaatatgcgccagggcgcgagctatgccattactaccatccttaactacatcattattgctgttggtgcgatgacggtgttcggaagcctgggcgtctcttgggataaactccagtggctggccgcagcattatccgtaggtcttggttttggtttacaagaaattttcggtaacttcgtctccggtttgatcattctattcgaacgtccggtgcgtattggcgatacggtaaccattggtagcttcagcgggacggtaagtaagatccgtattcgtgcgacaacgattaccgatttcgatcgcaaagaagtgatcatcccgaacaaagcgtttgttaccgagcgtctgatcaactggagcttgactgacactactacgcgtctggtgatccgtctcggcgtggcctatggctccgatctggaaaaagtgcgtaaagtgttactgaaggcggcgactgagcacccaagggtgatgcacgaaccaatgccggaagtcttctttacggcatttggtgccagcacgttggatcatgagctgcgtctgtatgtgcgtgaactgcgtgaccgtagtcgtactgtcgatgagctgaaccgtactatcgatcagctgtgccgtgaaaacgacatcaacattgcctttaaccagcttgaagtgcatctgcacaacgagaagggcgatgaggtgacggaagtaaaacgcgactacaaaggcgatgacccgacgccagcggtagggtaaaaacgaaagggggcaacatttagttgccccgagattgctaacaaagtgcgcgttgttcatgccggatgcggcgtgaccgccttatccggcctacgaaaccgcaagaattcaatatattgcaggagcggtgtaggcctgataagcgtagcgcatcaggcagttttgcgtttgcccgcaaccttaggggacatttagcgaccccatttatttctcacttttccgcctcatcatcgcgcgttaatttcttttcataatcacgctttacaatatccagcgcgcgcagcacggtactggcagggatctgattttcctccagcagcacaatcaaatcgacagccagtttgacatcgtcaggggcattttccagactcatattctctccattgttagcgggttaaacgcgctaacctgttttcgattttttccagcgcatggcggcagcgtgccaggcgcgcttcataggcttccacttcacgatgcagcgtttgctgttccacgagatcggtcacccgcgccagacgggctctgcgttcggcaaccatctcacgtagccgccgctcaaaatcctgatgctgaatacgtttacgctgccagcgggcaattttcggtggtgcactgtcccactcgcgcaaactccaggcggaggcttcacgcgcgatggcttccagttgtgccgccagatgttccgccagccaggccacttgcggcagctgttgctgctcaactgcatgacgaagcgcagccagattatcgcccgcctcgtcgagacaagcctgtagtgttgtcgcacgagtctgaaaaagatgcctgtcgaaacgagcacttagcgtggcgaactgactcaccggggcacaacgctgacgcagcgtagcgagctgtccttccagtttttccagcagcagggcggttttcacgataagacctcaatgaaaatgataattgttatgctaaagtagccactctgtaagctgacaacactcaatatgcaacgaatcattttaatcatcattggctggctggcggtagtgctgggtacgctgggcgtggtattaccggtattaccgacgacgccgtttatcctgctggcggcctggtgctttgcccgttcttccccgcgctttcacgcctggttgctgtaccgcagttggtttggcagctatctacgtttctggcagaaacatcatgcgatgccgcgcggcgtcaaaccgcgggcgattttgcttattttgctcacgtttgccatttctctgtggttcgtccagatgccatgggtgcgcatcatgttgctggtaattctcgcctgtttgcttttctatatgtggcgaattccggtgattgatgaaaagcaagaaaagcactgaagcacaacaatcgcagttgcaattattgcgtacagccagtacattctggcgttttcgagcacaggcgcaggcggtcaaaggttaaacaactgttacttttgatacgtttaaaacgcgccgtgagtaccaccgtaacaagcaggcatacacttatgaccgcgactgcacagcagcttgagtatctcaaaaatagcatcaaaagcattcaggactacccaaaacccggcattcttttccgcgatgtcaccagcttactggaagacccgaaagcttacgctctcagcatcgacttgctggttgagcgttacaaaaatgcgggcattaccaaagttgtcggcaccgaagcgcgtggcttcttgtttggcgctccggtagctctgggtctgggcgttggctttgtaccggtccgtaaaccgggcaaactgccgcgtgaaaccatcagtgaaacttacgacctggaatacggcaccgatcagctggagatccacgttgatgccatcaaaccgggcgacaaagttctggtggtggacgacctgctggcaaccggcggcactatcgaagcgaccgttaaactgatccgtcgtctgggtggtgaagtggctgacgctgcgttcattatcaacctgttcgatctcggcggcgaacagcgtctcgaaaaacagggcattaccagctacagccttgtcccgttcccgggccattaattatcgccagtcttgtgctgcccacgctacggacagcacaagatgtgcattcagcctcgccgttctgacggggctgtgttagcattaccccttcgtgaatccaccttccagcgtttcagagcctgccaatgagttatcaggtcttagcccgaaaatggcgcccacaaacctttgctgacgtcgtcggccaggaacatgtgctgaccgcactggcgaacggcttgagcttagggcgtattcatcatgcttatcttttttccggcacccgtggcgtcggaaaaacctctatcgcccgactgctggcgaaggggctaaactgcgaaaccggcattaccgcgacgccgtgcggcgtgtgcgataactgtcgtgaaatcgagcaggggcgctttgtcgatctgattgaaatcgacgccgccagccgcaccaaagttgaagatacccgcgacctgctggataacgtccagtacgctccggcgcgtggtcgtttcaaagtttatctgatcgacgaagtgcatatgctgagccgccacagctttaacgcactgttaaaaacccttgaagagccgccggagcacgttaagtttctgctggcgacgaccgatccacagaaattgccggtgacgattttgagtcgctgtctgcaatttcatctcaaggcgctggatgtcgagcaaattcgccatcagcttgagcacatcctcaacgaagaacatatcgctcacgagccgcgggcgctgcaattgctggcacgcgccgctgaaggcagcctgcgagatgccttaagtctgaccgaccaggcgattgccagcggtgacggccaggttagtacccaggcggtcagtgcgatgctgggtacgcttgacgacgatcaggcgctgagcctggttgaagcgatggtcgaggccaacggcgagcgcgtaatggcgctgattaatgaagccgctgcccgtggtatcgagtgggaagcgttgctggtggaaatgctcggcctgttgcatcgtattgcgatggtacaacttagccctgctgcacttggcaacgacatggccgccatcgagctgcggatgcgtgaactggcgcgcaccataccgccgacggatattcagctttactatcagacgctgttgattggtcgcaaagaattaccgtatgcgccggaccgtcgcatgggcgttgagatgacgctgctgcgcgcgctggcattccatccgcgtatgccgctgcctgagccagaagtgccacgacagtcctttgcacccgtcgcgccaacggcagtaatgacgccaacccaggtgccgccgcaaccgcaaagtgcgccgcagcaggcaccgactgtaccgctcccggaaaccaccagccaggtgctggcggcgcgccagcagttgcagcgcgtgcagggagcaaccaaagcaaaaaagagtgaaccggcagccgctacccgcgcgcggccggtgaataacgctgcgctggaaagactggctagcgtcaccgatcgcgttcaggcgcgtccggtgccaagcgcgctggaaaaagcgccagccaaaaaagaagcgtatcgctggaaggcgaccactccggtgatgcagcaaaaagaagtggtcgccacgccgaaggcgctgaaaaaagcgctggaacatgaaaaaacgccggaactggcggcgaagctagcggcagaagccattgagcgcgacccgtgggcggcacaggtgagccaacttagcctaccaaaactggtcgaacaggtggcgttaaatgcctggaaagaggagagcgacaacgcagtatgtctgcatttgcgctcctctcagcggcatttgaacaaccgcggtgcacagcaaaaactggctgaagcgttgagcatgttaaaaggtagtacggttgaactgactatcgttgaagatgataatcccgcggtgcgtacgccgctggagtggcgtcaggcgatatacgaagaaaaacttgcgcaggcgcgcgagtccattattgcggataataatattcagaccctgcgtcggttcttcgatgcggagctggatgaagaaagtatccgccccatttgatcgtaagcacagcttacgttcgtcatccttaacgtgattgagagagaaacctatgtttggtaaaggcggtctgggtaacctgatgaagcaagcccagcagatgcaagaaaaaatgcagaaaatgcaggaagagatcgcgcagctggaagtcaccggcgaatctggcgcaggtctggtaaaagtgaccatcaacggtgcacacaactgccgtcgcgtagagatcgacccgagcctgctggaagacgacaaagagatgctggaagacctggtggctgcagcattcaacgacgcagcacgtcgtattgaagaaacgcagaaagaaaaaatggcctctgtatcctccggaatgcagctgccgcctggctttaagatgccgttctgatgcaaaccagcccgctgttaacacagcttatggaagcactgcgctgtctgccgggcgttggcccgaagagcgcgcagcgtatggcgttcacgctgcttcagcgcgatcgtagcggcgggatgcgtctggcgcaggcgctcacccgggcgatgagcgaaatcggccactgcgccgattgccgcactttcaccgaacaggaagtctgtaacatctgtagcaatccgcgtcgtcaggaaaacggtcaaatctgcgtggtggagagtccggcggacatctacgccattgagcagacggggcagtttagtggtcgttattttgtgttgatggggcatctgagtccgctggacggcatcggtccggatgatatcgggcttgatcgtctggaacagcgtctggcagaggaaaaaatcactgaagtgatcctcgccaccaaccccacggttgaaggtgaagctaccgctaactacattgccgagctttgcgcgcaatatgacgtggaagccagccgaatcgctcatggcgttccggttggcggcgagctggaaatggtcgacggcaccacgttgagtcactcccttgccgggcgtcataagattcgtttttaagcaaacgagagcaggatcacctgctctcgcttgaaattattctcccttgtccccatctctcccacatcctgtttttaaccttaaaatggcattattgaggtagacctacatgaaaggacaagaaactcgtggttttcagagtgaagtgaaacagcttctgcacctgatgatccattctctctattccaataaagaaatcttcctgcgtgagcttatctctaacgcctccgatgcggcggacaagctgcgtttccgtgcgctctctaacccggacctgtacgaaggtgatggcgaactacgcgttcgtgtctctttcgataaagacaagcgtacgctgaccatctccgataacggcgtggggatgacccgcgacgaagtgattgaccatctggggactatcgctaaatccggtaccaaaagtttcctcgaatccctgggttctgaccaggcgaaagacagccagctgatcggtcagtttggtgttggtttctactctgcgtttatcgtggccgacaaagtgaccgtgcgtactcgcgcggcaggcgaaaaaccagaaaatggcgtcttctgggaaagcgctggcgaaggtgaatacaccgttgccgacatcaccaaagaagatcgtggtactgaaatcaccctgcatctgcgtgaaggcgaagacgagttcctcgatgactggcgcgtgcgttccatcatcagcaaatactccgaccatatcgcgctgccggtagagatcgaaaaacgcgaagagaaagacggcgaaaccgttatctcctgggagaaaatcaacaaagcgcaggcgctgtggactcgtaacaagagcgaaatcaccgatgaagagtacaaagagttctacaaacacatcgcccacgactttaatgatccgctgacctggagccacaaccgtgttgaaggtaagcaggagtacaccagcctgctgtacatcccgtcccaggctccgtgggatatgtggaaccgcgatcataaacacggcctgaaactgtatgttcagcgtgtgttcatcatggacgacgcagaacagttcatgccgaactatctgcgcttcgtgcgtggtctgattgactccagcgatctgccgctgaacgtttcccgtgaaatcctccaggacagcacggtaacgcgtaacctgcgcaatgcgctgaccaagcgtgtgctgcaaatgctggaaaaactggcgaaagacgacgcggaaaaataccagaccttctggcaacagtttggcctggtactgaaagaaggtccggcggaagatttcgctaaccaggaagcgatcgccaaactgctgcgttttgcttctacccataccgattcttctgcgcagaccgtatctctggaagactacgtttcccgcatgaaagaagggcaggagaaaatctactacatcaccgcagacagctatgcggcagcgaagagcagcccgcacctggaactgctgcgtaagaaaggcatcgaagttctgctgctttccgaccgcatcgatgagtggatgatgaactatctgactgagttcgacggtaaaccgttccagagcgtgtctaaagttgacgagagccttgaaaaactggctgacgaagttgatgagagcgcgaaagaagcggagaaagcactgactccgttcatcgaccgtgtgaaagccctgctcggcgagcgcgtgaaagatgtccgtctgactcaccgtctgaccgatacgccagcgatcgttagcaccgacgcggacgaaatgagcactcagatggcgaaactgttcgctgcggcgggccagaaagtgccagaagtgaaatacatcttcgaactgaacccggatcacgtactggtgaaacgtgcggcagatactgaagatgaagcgaagttcagcgagtgggtagaactgctgctggatcaggcgctgctggcagaacgcggcacgctggaagatccgaacctgtttattcgtcgtatgaaccagctgctggtttcctgatgtaatgccggatgaccttcgtgtcatccggcatttttcttttcatcatctgcactttccgcaaattatctcgccattaaccgtttcagccccaggtgcctttcttgaggcaatcgcctgttggtggtatcgtttatcgctttttcaaaaaattcgacacattttaaggggattttcgcaatgcgtatcattctgcttggcgctccgggcgcggggaaagggactcaggctcagttcatcatggagaaatatggtattccgcaaatctccactggcgatatgctgcgtgctgcggtcaaatctggctccgagctgggtaaacaagcaaaagacattatggatgctggcaaactggtcaccgacgaactggtgatcgcgctggttaaagagcgcattgctcaggaagactgccgtaatggtttcctgttggacggcttcccgcgtaccattccgcaggcagacgcgatgaaagaagcgggcatcaatgttgattacgttctggaattcgacgtaccggacgaactgatcgttgaccgtatcgtcggtcgccgcgttcatgcgccgtctggtcgtgtttatcacgttaaattcaatccgccgaaagtagaaggcaaagacgacgttaccggtgaagaactgactacccgtaaagatgatcaggaagagaccgtacgtaaacgtctggttgaataccatcagatgacagcaccgctgatcggctactactccaaagaagcagaagcgggtaataccaaatacgcgaaagttgacggcaccaagccggttgctgaagttcgcgctgatctggaaaaaatcctcggctaattcgaaagcgcgcacggacagtcccctcgccccctcggggagagggttagggtgaggggaacaggcccgcacaagcaaacttatcagcaatctcaggccggatattcattcggccttttacaaaaacctcaatctgcgctattcctttttctgatttgacctctcacagcaattagttcttcttcctcacttttccgctacaattatcaacaagttgaatcgataagaggcggtaatgcgtcagactaaaaccggtatcctgctggcaaacctgggtacgcccgatgcccccacacctgaagcggtaaaacgctatctgaaacaatttttaagcgacagacgcgtggttgataccagtcggttgttatggtggccattgctgcgcggcgtgattttgccgctgcgcagcccgcgtgtggcgaagctgtatgcctctgtctggatggaaggtggcagcccgctgatggtttacagccgccagcaacagcaggcgctggcacaacgtttaccggagatgcccgtagcgctgggaatgagctacggcagcccaagtctggaaagcgccgtagatgaactcctggcagagcatgtagatcatattgtggtgctgccgctttatccgcaattctcctgttctacggtcggtgcggtatgggatgaactggcacgcattctggcgcgcaaacgtagcattccggggataagctttatacgtgattacgccgataaccacgattacattaatgcactggcgaacagcgtacgcgcttcttttgccaaacatggcgaaccggatctgctactgctctcttatcatggcattccccagcgttatgcagatgaaggcgatgattacccgcaacgttgccgcacaacgactcgtgaactggcttccgcattggggatggcaccggaaaaagtgatgatgacctttcagagccgctttggtcgggaaccctggctgatgccttataccgacgaaacgctgaaaatgctcggagaaaaaggcgtaggtcatattcaggtgatgtgcccgggctttgctgcggattgtctggagacgctggaagagattgccgagcaaaaccgtgaggtcttcctcggtgccggcgggaaaaaatatgaatatattccggcgcttaatgccacgccggaacatatcgaaatgatggctaatcttgttgccgcgtatcgttaaagctgagcggtaaagaactgagcgccgtcgcgaagagcctcgtcggcggttttcatcatccgactataatgcaaaaaggcgtgcagcgtgcctgggtagagtttgaactcacagggctgctgatgcgccgctaacgtctggtaaagcagacggctgtcatccagcagcggatcgaactccgccccggcaataaaacagggcggaacttcgcgagtgagatcattattaaacagacagtaatacgggctctcgcggtccgcgtcgttgcttaaatatgcctcttcgtacatctgcaaatcctgttgcgttaagccatcccagacaccgcccaacagacgacgagtcacggaatcccgtaatccgtaaagcccataccacagcaaaacgcccgcaactttaccgcaatcgatctgtttatcacgcaaccacaacgcactggcgagcgccagcatggcacctgcggaatcaccggcaaagccaatgcgggacatattgatttgataatcctccgcctgctggtggaaataacaacaagcagccacaatttcctctatcgcttgcggaaaacgcgcttcaggactaagggtgtaatcaataccaatcaccgtacattggctgtagcttgccagcaggcgcatgatgcgatcgtgggtatcgagattgccgagaataaaaccgcctccatgcaaataaaatagcgtcgctgggctatctggctgcggacaaaagagacgtgtttccacctgcccatattttgttggaaccatgtaagctctggttgccatttctggagcgcccgcattccagaatcggcgctcaagcgtgtaatactgtcgttgctcagcaatcgttcccgttgcgggccagggcggtaaatccggctgaagagtattcacaacggtcttcatttcagcagaaataaggtccagaacaggtagtttgttttccggcttcatacaaaaactcctttcaaattacgtcattgtaaggaaccactgccatgaaaatgcgatcccgcctgctgatattgaaactggctgcgtctcgcgcgctcccgtcagattgtgttaacattcgccgctcagttaaccacccgtaaaaacaaccatgaaatttcccggtaaacgtaaatccaaacattacttccccgtaaacgcacgcgatccgctgcttcagcaattccagccagaaaacgaaaccagcgctgcctgggtagtgggtatcgatcaaacgctggtcgatattgaagcgaaagtggatgatgaatttattgagcgttatggattaagcgccgggcatagtctggtgattgaggatgatgtagccgaagcgctttatcaggaactaaaacagaaaaacctgattacccatcagtttgcgggtggcaccattggtaacaccatgcacaactacagcgtgctcgcggacgaccgtagcgtgctgctgggcgtcatgtgcagcaatattgaaattggcagttatgcctatcgttacctgtgtaacacttccagccgtaccgatcttaactatctacaaggcgtggatggcccgattggtcgttgctttacgctgattggcgagtccggggaacgtacctttgctatcagtccaggccacatgaaccagctgcgggctgaaagcattccggaagatgtgattgccggagccagcgcactggttctcaccagttatctggtgcgttgcaagccgggtgaacccatgccggaagcaaccatgaaagccattgagtacgcgaagaaatataacgtaccggtggtgctgacgctgggcaccaagtttgtcattgccgagaatccgcagtggtggcagcaattcctcaaagatcacgtctctatccttgcgatgaacgaagatgaagccgaagcgttgaccggagaaagcgatccgttgttggcatctgacaaggcgctggactgggtagatctggtgctgtgcaccgccgggccaatcggcttgtatatggcgggctttaccgaagacgaagcgaaacgtaaaacccagcatccgctgctgccgggcgctatagcggaattcaaccagtatgagtttagccgcgccatgcgccacaaggattgccagaatccgctgcgtgtatatagccacattgcgccgtacatgggcgggccggaaaaaatcatgaacactaatggagcgggggatggcgcattggcagcgttgctgcatgacattaccgccaacagctaccatcgtagcaacgtaccaaactccagcaaacataaattcacctggttaacttatagtagcttagcgcaggtgtgtaaatatgctaaccgtgtgagctatcaggtactgaaccagcatagtcctcgtttaacgcgcggcttgccggagcgtgaagacagcctggaagagtcttactgggatcgttaagttatcgtcggttcgtaggccagataaggcgttcacgccgcatctggcatttggctctcgatgcctgatgcgacgctggcgcgtcttatcatgcctacatatttttcatattttacatccggcaaccaccgtttaccccgtcaccacctcacccgccggtggcgtttccagcagttccagcatggtacgggcgatttcacgctcgcccatcactacctgattcgcaccacgttcggtgatatacgccacttcatcgtcataatgggcgcgggcaataatctcaatatccggatttttcgcgcgggcagatgccacaatctcacccgcttcataaccgttgggaatcgtcaggatcagccattttgcacattccagatgcgccagttgcataatttcttcgttcgccgcattgcccaatactgcgcggaccccgcgctctcgcagctcatcaacacgggttcgactcgtctcaatcaccaccagcggaatatcagaggcgagcaatttctcccccagcaggctgcctacacgaccgtaacccaccagtagcgcatggttgcaaatatccactgggatctgcttctcttcttcgattgcctcttccagcgtctgctcttccagcgtttcggtcttcgccagatatttctccagtagtgcgaacagtaccgggttgagcataatgctcaggatcgcccctgccagtaccaggttttgtccggcctgcggcagtaaattcaatgccattcccagtcccgccaggataaacgcgaactcaccaatctgcgccaggctggcggcgatggttaatgccgtacgttgggagtgaccaaacagtcgcaccaggaaaaatgcggctaagctcttaccaaacagaataatcgccagcgtcgccagcactgccagcggttgctgaatcagaattaacggatcaaacaacatcccgacggagacaaaaaacagcaccgcaaacgcgtcgcgcaatggcagcgtatcgtgggcggcacggtgactcagttcagactcgttcagtaccatcccggcaaagaacgcaccgagtgcaaaggagacatcaaacagctctaccgcaccaaaggcaacccctaacgccagcgccagcacgctcagggtaaacagctcgcgagaaccggttgccgcgctgcgtgccataatccacggcaccagacggcgacctaccagcatcataatggcgataaatgcgatcactttgccgatggtgatccccatatcgactgcaagagtggcaaagcccacatcgccctgttccatcattcctgccactgcgggcagcaacaccagcgtcagaaccattaccaggtcttccacaatcaaccaaccgatggcgatttgcccacgctgactgtcaattaattgccgttcttcaagtgcgcgcagtaacaccacggtactggcggtggaaagacataaaccgaacacgataccggtcattaagctccagcccagcacggcagagagcgccatacccagcagcgtcgccacggctatctgggcgatcgcaccgggaatggcgatggcctttaccgccatcaaatccttcaggctaaagtgcaaaccgacgccaaacatcaacagaatgacgcccagttcagccagttccggggcaagcttggtatcggcaacaaagcccggagtgaatggtcctgccagcacacccgctaacagatatcccaccagaggagaaatacgtagtttattggccagcatgccgaggataaaggcgagcacaaggccgccaacaatggtggtgataagcggggtggcgtgatgcattccgtctccttttcctggtggttattgtccatttttggccgggaaaaccaaaattacaggtaatagtttatgacaatttcattgatgatgttcatgaataattattgaattttgcagaaaaatggaattagctgcaaaaaaagcacggatcggaaaacagaaggcggtttaacagaggaaaggcttatggcgactgtaaaacgatgcagccaaagtttgcctttggctgcaatgaaatcagtctttatgccggttatcaggcaggaatatggtcaacatccccaatagtggcaggaaagcacagattttatagactaactcgatgctggtgtgatcggcgataagccccagaactgccgctcccagacctcccatgccaaaagcaaaaccgaaaaagagtccagaaaccataccgatacgtcctggaagcagctcctgagcgtagaccagaatggcagagaatgcgctagcgaggataaatccaataatcaccgttaaaacccccgtccagtgcaggctggcgtagggtaaaatcagcgtaaacggcgcaacgccgaggatagagccccaaatcacatatttccgcccaattttatcccctacaggcccgccgatcaccgtacctgccgcaacggcaaacaggaaggcaaacagatgaagctgagcattctggatagataatccgaatttttgcatcagataaaaggtgtaatagctgctgatgctcgccatatagaaatatttgctgaaaatgaggattaacagaatgctgaccgccagtacaactttattgcgcggcagtggattgataatcgtcgctttgggttttcctttattcattcggtgctgtgcgctgtaccaacggctgatttgcgccaacaccacgatcgccagcagtgccgcaagcacaaaccaggcaacgttgcctttgccataaggcgcgataatcaccgccgccagcaagggtcccagggaactgccaaagttgccgccgacctgaaagatagattgcgccaggccatgccgcccgccggaagccatacgggccacgcgagaagattccggatgaaagacgctactaccggtaccgaccagcgccgccgccagcagaactgcgccaaaactgcccgccagcgcaagcagcaccagaccgcttaaggtaaagcacatgccaattggcaagctccatggcatcggatatttatcggtccagtagccgaccactggttgcagtaggctagaggcgagctggaaggtgagggttatcatgccaatctgcataaatgtcagagaaaattcactctgaagcagcggataaatcgccagaatcaggctttggatcatgtcgttcagcagatgactgaggctgatagcacctaaaataccaaagcttgttcgggccttggtcgtactcgcagccgcgcccgccacaggctggggttgttcactcattgccataggaaagtcactttttcagggttgcgatgtaaagaatgatcttatttgtgattattaccagactaacatacctgtatgcgtcgtctgaaggaagtctcaacgccgaatacagaatttctaatctggatgcagatttatcttcaccggacgcagacttgtctatgatgtcgcgtcatactatttttcaacacgttgaaatcaggtcagggagagaagtatgaaattattgcagcggggcgtggcgttagcgctgttaaccacatttacactggcgagtgaaactgctctggcgtatgagcaggataaaacctacaaaattacagttctgcataccaatgatcatcatgggcatttttggcgcaatgaatatggcgaatatggtctggcggcgcaaaaaacgctggtggatggtatccgcaaagaggttgcggctgaaggcggtagcgtgctgctactttccggtggcgacattaacactggcgtgcccgagtctgacttacaggatgccgaacctgattttcgcggtatgaatctggtgggctatgacgcgatggcgatcggtaatcatgaatttgataatccgctcaccgtattacgccagcaggaaaagtgggccaagttcccgttgctttccgcgaatatctaccagaaaagtactggcgagcgcctgtttaaaccgtgggcgctgtttaagcgtcaggatctgaaaattgccgttattgggctgacaaccgatgacacagcaaaaattggtaacccggaatacttcactgatatcgaatttcgtaagcccgccgatgaagcgaagctggtgattcaggagctgcaacagacagaaaagccagacattattatcgcggcgacccatatggggcattacgataatggtgagcacggctctaacgcaccgggcgatgtggagatggcacgcgcgctgcctgccggaagcctggcgatgatcgtcggtggtcacagccaagatccggtctgcatggcggcagaaaacaaaaaacaggtcgattacgtgccgggtacgccatgcaaaccagatcaacaaaacggcatctggattgtgcaggcgcatgagtggggcaaatacgtgggacgggctgattttgagtttcgtaatggcgaaatgaaaatggttaactaccagctgattccggtgaacctgaagaagaaagtgacctgggaagacgggaaaagcgagcgcgtgctttacactcctgaaatcgctgaaaaccagcaaatgatcagcctgttaagtccgttccagaacaaaggcaaagcgcagctggaagtgaaaataggcgaaaccaatggtcgtctggaaggcgatcgtgacaaagtgcgttttgtacagaccaatatggggcggttgattctggcagcccaaatggatcgcactggtgccgactttgcggtgatgagcggaggcggaattcgtgattctatcgaagcaggcgatatcagctataaaaacgtgctgaaagtgcagccattcggcaatgtggtggtgtatgccgacatgaccggtaaagaggtgattgattacctgaccgccgtcgcgcagatgaagccagatagtggtgcctacccgcaatttgccaacgttagctttgtggcgaaagacggcaaactgaacgaccttaaaatcaaaggcgaaccggtcgatccggcgaaaacttaccgtatggcgacattaaacttcaatgccaccggcggtgatggatatccgcgccttgataacaaaccgggctatgtgaataccggctttattgatgccgaagtgctgaaagcgtatatccagaaaagcagcccgctggatgtgagtgtttatgaaccgaaaggtgaggtgagctggcagtaatccgaaagtgccggatgtttgcatccggcacaatgcttaatcgcggcgggcgatatcagcaaatttggcatcgaggatctttgccagatcgcctgccgccagttcgatatccagtccgcgcttgccgccggaaacataaatagtggcaaattcttgtgcgggggcgtcgataatcgttggcagacgttttttctgccccagtgggctaatccccccaaccaggtatcccgtgctacgctgcgcgaccatcggatcggccatctcaactttcttggcacccagcgcttttgctacttttttaagatccagttgacctgcgaccggcgtaacggccacggcaaggtgtttcatatcaccgttcactgccaccagcagcgttttgtagacctgatccggattcaaacctaattttttgacgacttcatcgccaaaattggtttcagccggatcgtgctcgtaggtatggatttgaaagctaatcttgtttttttcgagtaatttaactgcgggtgtcatggtaattttcctgccttaaacaaaaaaacgaagcaagcatacgcctgatggcggtccaaaaaaaagagtcatcttgcctaagagtattggcaggatggtgagattgagcgacaatcgagttacaccgtcgcttaaagtgacggcataataataaaaaaatgaaattcctctttgacgggccaatagcgatattggccatttttttagcgcaacatttgcggcaaattcccttctccatacaggtgtagtgcaccgaccgcgaccacatatcgccccggcggcatggcgcgtaatttatcccgccaggcgagatttcgctgatgcatcagcacatcgtacaggctctgactgaacgtattgggcagcgttatatcattattttgcggcggtgcattcagccaccagctcatcatttgttgcagcaaccgtgcgttggtatgccagtgggtcagcgtatcgtccagcagcgccagtcctttgtcagggagctggagcaacatggcaatctggttttcagccccttccagttcaatcacgggtttatgttgttgcttcgccgcctgcaatagctggtaatcgataccgtattctgcccgcagccccagtttttgtgcctgcgtcgcctgaagaaccatcgcgatttgccacagcggttgggtagaaaagagactgggagaaatgcccatctcctggctaatgtgctgcaggttttggagttgctcctcgctaatgcgctcttccagcgcctcgcaggcaggcaaattagcaaaaggcgtatcgctggtggaaacatccgcctcgacgatcagcgcatcggcgtttttgagctttttgagcaaacgggtgggcaggggagccatatcgtggctacccatatgaatactgccaatcagatgaaaatggcgattgccggggagggtgatatcgatggcaggccaggtgtaatgattaccgcgcagcgcggcccaaagcgtttttacccggtacaacagatccatacgacctccctttgtgaaatatcatgctagcgcgcggtgagggatggcgcaaatggagttggagacttgtttaatgtgtttgtatgattcagtatgttcttgcatcgctattcacaaggaagcaacagttaaaaaccatgaaacaggcaacaagaaaaccgacgacacccggagatattcttctctatgaatatctggaaccgctcgatttgaaaatcaatgagttagcagagttgctgcatgttcatcgtaatagcgtcagtgcactgatcaataacaatcgtaaactcactactgagatggcatttcgtctggcgaaagtttttgataccacagtcgatttttggctaaacctccaggcggcggttgatctttgggaagttgaaaacaacatgcgcacccaggaagaattgggacggattgaaacagtggctgaatatttggcacgccgtgaagagcgtgcaaaaaaggtcgcgtaaggccaaaacatcgcttcatctcgtaggccggataaggcgttcacgccgcatccggcatccgagcaccattgcctgatgcgacgcttacccgtcttatcaggcctacaaacttgtgcctgaaccgtaggccggataaggcgtttacgccgcatccggcatccgagcaccattgcctgatgcgacgcttacgcgtcttatcaggcctacaaacctgtgcctgaaccgtaggccggataaggcgtttacgccgcatccggcagtcatgcgtcgatgccaaatgcgccaccctaaagcagcgcatccgcaatgatgtacttattccttcggtttaaaccgcagcaaccggttggcgttactcactacggtaatgctgctgagcgccattgccgctccggcaactaccgggttaagcagtgttccagtgaacggccacaaaataccggcggcgaccggaataccgatactgttgtagataaacgcaccgagcaggttctgcttcatgttgtgcagcgttgcgcgggaaatagcgagcgcatccgcaacgcccatcaggctatggcgcatcagggtaatcgccgcggtttcaatggcaacatcactgccgccacccatcgcaatgccgacatccgcctgagccagcgctggcgcgtcgttaatgccgtcgcccaccattgccacctaacgtccttcactttgcagatgtttgatcgcttcggctttaccgtccggcagcaccccggcgatcacctcatcaatccctgcttctttggcgatcgcattggcggtggttgggttatccccggtcaacatcaccagacgatatcccgctttatgcaggcgttgcagcgccgccacgctatcactacgcaacggatcgcgtactgccagcagggctaccgctttcccgtcaaccgccagcagcacaggcgttgccccttggcttgcctgagcagtaatctccgcttcgatagctttggtaccaacctgttgctcatttaacagcgcctgattgcccagcaataacgcatgaccttcagcttcaccgctcacgcccagcccgcgcaatgtgcggaaaccgttgacctgcggtagctgcatatcacctgctttatcgaggatcgctcgtgccagcggatggctggaaccttgctccagtgccgccgccagacgcaatgcctgcgcttcatcaacatcagcaaatgttttcactgcgacaacctgcggcttcccttcagtcagcgtcccggttttatcgaacactacagtgtcgagtgtactggcgcgttgcagcgcgtcagcgtcccgcaccagcacgccaaactcagccgcccgcccgacgccggaaataatgctcatcggcgtcgccagccccagcgcacacggacaggcaataatcagtaccgtggtggcaatcaccagggtatagacaatctgcggtgccggaccaaagaaataccagattgccgcactgacaagcgcaataaccaccactaccggcacaaatacggcactgattttatccgccagctgaccgatttctggcttgctgctctgggcctggcgcaccatgcgaatgattcgactcagcgtagtatggctgccaaccgcactggcacgaaacagcacactgccgtcctgtaccactgtcccggcatggacgctatcgccttcgcctttttgctgcgggattggttcgcccgtcagcatcgcttcatccagccatgcttcgccctgggtaatctcgccatctaccggcacgcgatcgccggtcgtcaggcgcagcaacatacctggctgcacttctgccagaggcacgcttttttcaccttcgtcagtaaccaggcgtgccgtcggcggggttaaatcgagtaacttttccagcgccttagaagaacgctggcgtgcgcgcgcttccagcatatggccgagattgatcagaccgataatcatcgcgctggcttcgtaataaagatgtcgcgcttccatcgggaaccactgcggccacaggttgacgctcatgctatagagccacgccacgccagtacccagcgccaccagcgtatccatcgtcgccgcaccgttcagcaggcttttccatgcactgcggtaaaaatggccgccggcgaaaaccatcactgccagggttatcaggccgataaccaaccacaggctgcggttgtcagcggtgaccatcatgttatcgccgatcatcccccagaccatcaccgggatacccaccgccagtgcgacaattgcctgccagcggaagcgcttcatcgtagcgacggcggtttcttgctggcgctcgcggcgtttagcgtcatcttcaatcgcttccgcgccgtagcccgctttttccaccgcctgcactaaatcttgtggggaggcactgcccatcaccagcgcagtacgctccgccaggtttacccgtgcctgagtgacgcccggtacgctttgcagcgcattttgtacgcgggtgacacagctggcgcagctcatgccgctcagcagcaactgctggctgtcatcgtcatcggcggtcgctgccggaagcgcctcagaaaccgctgtcagtgcttcgctcgggatactactctccgccagcggtttagcctttgggtggcttacagatgcgtcataacccgcttgtttgatggtttcgatcagctgttctgcactggcagtcccggtaacgtgcgcttcagtgatagacacatccgcctgctcaacatccggacgctgttcaagactttctttcacgcgtttaacgcagtgaccgcaggacaggccgtccagggtcaggtcgatagtttgactcataaaacactcctttaagacagttttgactggctgtgataaaggttaaaccttccagcaaggggaaggtcaagaaattaataaaccaggcgggtaaaagtccgtaaagattaaaaaatcggctcgatttgcatcaggattagacatttatctctttgttttcctgtagttaagttgcgggtgctaagttaaatcaggatgcctgaaaatcggcaccggggtgaggaattacctcccgcatctataaaaaggagttaacaaaagatgttagatgcaaacaaattacagcaggcagtggatcaggcttacacccaatttcacagtcttaacggcggacaaaatgccgattacattccctttctggcgaatgtaccaggtcaactggcggcagtggctatcgtgacctgcgatggcaacgtctatagtgcgggtgacagtgattaccgctttgcactggaatccatcagcaaagtctgtacgttagcccttgcgttagaagatgtcggcccgcaggcggtacaggacaaaattggcgctgacccgaccggattgccctttaacagtgttatcgccttagagttgcatggcggcaaaccgcttagcccactggtaaatgctggcgctattgccaccaccagcctgattaacgctgaaaatgttgaacaacgctggcagcgaattttacatatccaacagcaactggctggcgagcaggtagcgctctctgacgaagtcaaccagagcgaacaaacaaccaacttccataaccgggccatagcctggctgctgtactccgccggatatctctattgtgatgcaatggaagcctgtgacgtgtatacccgtcagtgctccacgctcctcaatactattgaactggcaacgcttggcgcgacgctggcggcaggtggtgtgaatccgttgacgcataaacgcgttcttcaggccgacaacgtgccgtacattctggccgaaatgatgatggaagggctgtatggtcgctccggtgactgggcgtatcgtgttggtttaccgggcaaaagcggtgtaggtggcggtattctggcggtcgtccctggagtgatgggaattgccgcgttcagtccaccgctggacgaagatggcaacagtgttcgcggtcaaaaaatggtggcaagcgtcgctaagcaactcggctataacgtgtttaagggctgatcatgatgaacacggaaggtaataacggtaacaaacctctcggtctatggaacgtcgtttccatcggcattggggcaatggtgggggcggggatcttcgcgctgctggggcaggctgcattgctaatggaagccagcacctgggtcgcctttgcttttggcggtattgtggcgatgttttccggttatgcctatgcgcgtctgggggcgagctatcccagcaatggcggcattatcgacttctttcgtcgcggattaggcaacggcgtctttagcctggcgctcagcttactgtacctgttgacgctggcggtgagcatcgccatggtcgcccgtgcttttggcgcttatgccgtgcagtttttgcatgaaggcagccaggaggagcaccttattttgctctacgcgttggggatcattgcggtgatgacgcttttcaactccttaagcaaccatgcggtagggcggctggaagtgatcctcgtcggcattaaaatgatgatcctgttattgctgattattgccggtgtctggagcctgcaaccggcgcatatttccgtctctgcgccccccagctccggtgcgttcttctcctgtattgggataactttccttgcctatgcgggctttggcatgatggcgaacgcggcggataaagtgaaagatccgcaggtcattatgccacgggcgtttctggtggcgattggcgttaccacgttgctttatatcagcctggcactggttttgcttagcgatgtaagcgcattagagttagaaaaatatgccgataccgccgtagcgcaggctgcttctccgctgctcgggcatgtgggttatgtgatcgtcgtcatcggcgctttactggcgacggctagtgccattaacgcgaacctgttcgccgtgtttaacatcatggacaacatgggcagcgaacgcgaactgccgaagctaatgaataaatccctgtggcggcagagtacctggggcaacattattgtcgtggtgttgattatgctgatgacggcggcactgaatttaggcagtctcgccagcgttgccagcgccacctttttgatttgctacctggcggtgtttgtggtggcgatccgcctgcgtcatgatattcacgccagcttgccgattcttatcgttggtacgttggtgatgttgttggtgatcgttggctttatctacagtctgtggtcccagggtagccgtgcgttgatatggattattggcagtctcttactcagccttattgtggcaatggtcatgaagcgcaataaaaccgtataacatctctctgtgcgcagtacttcctgtattattgtggtggcggtcgatattcgcactggcaaaaaaacgtgcttgaatatctgttgaaaccctttaacaaagcacaggaggcgttgcgcgaacgatgaacatcagcgatgtagcaaaaattaccggcctgaccagcaaagccattcgcttctatgaagagaaggggctggtgacgccgccgatgcgcagcgaaaacggttatcgcacctacacgcagcagcatctcaacgaactgaccttactgcgccaggcacggcaggtgggctttaacctggaagagagcggcgagctggtgaatctgtttaacgacccgcagcggcacagcgccgacgtcaaacggcgcacgctggagaaggtggcggagatcgaacgacacattgaggagctgcaatccatgcgcgaccagctgctggcactggcgaatgcctgccctggcgatgacagcgccgactgcccgattatcgaaaatctctccggctgctgtcatcatcgggcagggtgattaagagctgacggctcggatatgtagggttatcccttctatcgcaatgacttcaacatgcgtacctgcaccgagatcctcgctggcgctgacaggccaactactgtcaccgacgcgcatatgaccgcgcccgttgaccagcggagattccagcacaaaacgtcggccaatcagctgctgcccgcgctggtttaaatgactatcgctgtgcttttgttcgcgcacccgccggctcaaccatttccaccacagccaggcggcgagcagcgtcaggatggcaaacattaccccttgccactcccaacccagcggcaccagccagaccaccaggccggtaatcaccgctgccacgccgctccacaacaaataaccatttccgcccagcatctcggctgccagcagcaaaccgccgagactgagccagaaaatatgtggatgaacgaccattaactccatcatggctgagtccgtttgttggcgctgtctttcaccagctcggcaatcccggcaatgctccccatcaggctgctggcctctaatggcatcatcactactttgctgttactggaggaaccgatctgctgtaacgcttcggtgtatttctgcgctacgaagtagttcaccgcctgaatatcaccggaggcgatagcttcagacaccattttggtggcgcgggcttctgcttcggcggaacgttcacgcgcttcagcctgtaaaaacgcgctctgacgttcgccttccgctttcaggatttggctctgtttttcaccttcggctttgaggatttccgcctgacggatcccttccgcttcaagaatgtaagcgcgtttggtacgttccgctttcatctgcgcgttcatactagagataagctctgccggtgggcgcacgtcgcgaatttcaatacgggtgactttaatcccccacgggttggtggcttcatcgacaatacgcagcaggcgactgttgatgctgtcgcgctgagagagcatttcgtcaagttccatactacccagcacggtacggatgttagtcatggtcaggttgatgatcgccagctccagattgctgacttcataagccgcgcgcggcgcgtcaatcacctgaataaagcacacggcgtcgatggtaacgttggcgttatctttgctgataacttcctgggaagggatatcgagcacttgctccatcatattgatcttgcgaccaatgcgatccataaacggcaccaccagactgagccccggctgtaacgttttggtatagcgaccaaagcgttctactgtccactgatagccctgcggtacgattttgacacccgcgccgacaatgaccagcgcgacaaaaatgagaatcgggataaagataagcatcggaaaaacctcctgttgtaccgtccataatcagcaaaattgctgcttgattaaacaaattatacctgattactgaaagagagttcccccttattcctgcgaaggataaactgtttttagtaaaaatcagaaaaagggaacagcgatgcaggaaaatagtcctttgcttcagctacaaaacgtaggatatctggcgggtgatgcgaagattcttaataacatcaattttagcctgcgtgctggcgaatttaagttaattaccggtccttctggttgtggcaaaagtacgctgctaaaaatagttgctagtttgatcagcccaaccagcggaacgttactgtttgaaggtgaggatgtcagcacactaaagccagaaatctaccgccaacaagtctcttactgcgcccagacaccgacgctgtttggcgatacggtatacgataatctgatctttccctggcagatccgtaaccggcagcctgacccagccatttttctcgattttctcgaacgcttcgccttgccggacagcattttgacgaagaatatcgccgagctatctggtggtgaaaaacaacgcatcagtttgattcgtaacctgcaatttatgccgaaggttttattgctggatgaaataaccagtgcgctggatgaaagtaataaacataacgtcaatgagatgatccatcgttatgtgcgcgagcaaaatattgccgtgctgtgggtgacacacgataaagacgaaattaatcatgcggataaagtgattacactgcaaccgcatgccggagaaatgcaggaagcacgctatgaactcgcataactaaagaaatgcaggaagcacgctatgaacagccataatattactaacgaaagtttagcactggcattaatgctggtggtggtggcaatcttaattagccataaagaaaaactggcgctggagaaaaatattctctggagcgtcgggcgagcgataattcagctgattattgtcggctatgtgctgaagtatattttcagcgtggatgatgccagcctgacattattgatggtgttatttatctgctttaatgcggcgtggaacgcgcaaaaacgcagtaaatatattgctaaagcttttatcagtagctttattgccattacggtcggggcgggaattaccctggcggtgctgattctcagtgggagcattgaatttatcccgatgcaggtgatccctatcgccgggatgattgccggtaacgccatggtagcggtggggttgtgttacaacaatttagggcaacgggtcattagcgaacagcaacagattcaggagaaactgagtcttggtgcgacgccgaagcaggctagtgcgatattgattcgcgacagtattcgcgcggctttaattccgacggtcgatagtgcaaaaacggttggcttagtgagtttaccaggaatgatgtccgggctgatatttgccgggattgatccggtgaaggcgattaaatatcagattatggtgacctttatgctgctcagtaccgccagcttgagcaccattattgcctgctatttaacctatcgtaagttttataatagccgccaccagttggtggtgacgcaattgaagaagaaatgatgcgatgccggatgcgcagcatcgcatccggcgttgtggttcatgtgccgatcaacggaatatcaatacaacaatgcatacagctggcggcgatacttgctcgccagtgcatcacccgtacccagcgcagcgaggatctcctggaacgttttacgcgtctgaccgtctgcggcggtgagatctttacgcagatgcccgaacagcaactccagcgcctcttcattgcgcccaacctgatgcagttgcagcgccagttgcgtcgccagtgcggcatcttctggattctccgccacctgctgttgcaactgttgaatttccggcgtatcagccgcctgcttcagcagttcgatttgcgccaccagcccctggtagcgggtgtcctgatcctgcaacggaatggttttcagcaccgcttccgcatcttcagaacggttcagcgcaatcagcgtttctgccagcagcaggccgatctccccgttctgattgctcaactgccaggcgtctttcagcaatggcagggcatcggtgtaattgctttcctgcatcagttgcatcgcctgctgcgctttcagctcttcttcgcgcggcagcactttatccagcagggcgcggatcgcctcttccggttgcggcccctggaagccatctaccggttgcccgttctggaacagatacacggtcggaatcgcacgcagaccaaactgcgcggcaatcatctgctccgcgtcgcagtccagcttcgccagaataaattgcccgttgtactgcgccgcgaggctttccagaattggggttaactgcaaacagtgctggctacgttcagaccaaaaatagaacagcaccggagtggtcatgctctgttcaagaacctgttgcaggttagattcgttaatgttgacaatattttctacggacatggagtcgctctctgttgtcgatattttctttgacatgggggcttaagcgcgcgcttcaactcacccctgcaatattttgtccatcacgcgccccggcagcaggcgcttaagcaccattaccgcccaggtcaccagcgtcaccggatagcgcatcttcggcttctcgctaataaaagcatggcgtactttgtccaccaccgcttccggtcccaacgtaaagcgggcggcgatgccgggattttcgactggtttatcactttgcgtctggttgacgttgtcggtgaagcgagtacgaatgggaccgggttcgatcaggctgactttaattccgctgtggcgcagctccatgcgcagtgcatcactccacgcctccagcgcatatttactggccgcgtaagcgccacgacccggcgtggagattaatcccatcacgctacttgtcatcacaatacgcccttcaccgtgcggtaacatcgcgggtaacaggcgcatggtgagctggtgtgcgccgaaaaagttggcggaaaactgctgttccatctgcgcacggctgatggtggaaagggggccatacatgccgaatccggcattgttaaagatcccatacagacaattatcggtcagggcgatcacctcgtcggctgcgcgatcaacactttctggactatccagatcgatcaacacgccggtaaatcccatgctgttcatgcgctcaacatcatccggtttccggcaacctgccagcacatgaaaaccctggcgttttaattcgagcgcgctttccaggccaattccactggaacatccggtaattaagacgcttttttgcataactttacctgtcaggatctccgttgctttatgagtcatgatttactaaaggctgcaacttatttaactgtcatgatttactaaaggctgcaactgcttcgccatccagtcggcaataaacggctgggcgtcgcggttgggatgaataccgtcatcctgcatccattgtggcttgaggtagacctcttccataaaaaagggcagcagcggaacatcaaactctttggcgagtttggggtaaatggcgctaaaggcttcattataacggcgaccatagtttgcaggcagacgtatttgcattaacaatggttcagcgttggcggctttgacatcctgcaaaatctggcgcagcgtttgctcggtttgctgtggctgaaaaccacgcaaaccgtcattgccgcccagttcaaccagcacccaacgcggctgatgctgtttcagcagagccggaaggcgcgccagtccttgttggctggtgtcgccgctgatgctggcattaactacgctcgttttactctgccacttatcattcaacaaggcaggccaggccgcgctggcagacattcgatacccggcgctcaggctatcacccagaatcaataacgtgtccgctgcggcggcacggaaggttaacaggaccaggaacaggaagggcaaatgccagcggaaaacattgttgaagttcatcatcttaagaagtccgtcggtcagggggagcatgaactctccatcctcaccggagttgagctggttgtcaaacgtggcgagaccatcgcactggtgggcgagagcggaagcggtaagagtaccttgctggcgatcctcgccgggcttgatgacggcagcagtggcgaagtgagtctggtgggacaaccgctacataatatggacgaagaagcgcgggcaaagttgcgcgcgaagcacgtcggctttgtttttcagagttttatgttaattcctacccttaacgcgctggaaaacgtcgagcttccggctctgctgcgcggtgagagtagcgcggaaagtcgtaacggggcgaaagcgttgctcgaacagttagggctgggtaaacgtctggatcatcttccggcacagctttccggcggtgaacagcaacgagtggcgctggcacgagcctttaatggtcgacctgatgtgctgtttgccgacgaacccaccggcaaccttgaccgccagacgggcgataaaattgccgacctgctgttttccctcaaccgtgaacatggcaccacgttgattatggtgacccacgacctgcaactggcggcacgctgcgaccgctgcttacggctggtgaacgggcagttgcaggaggaagcatgattgcacgttggttctggcgcgaatggcgtagcccgagcctattaattgtctggctggcgctaagcctggcggtggcctgcgtgctggcgctgggcaatatcagcgatcgcatggagaagggcttaagccagcaaagccgtgagtttatggcgggcgatcgggcgttgcgcagtagtcgcgaagtgccgcaagcgtggctggaggaagcgcaaaagcgcggcctgaaagtcggcaagcagctgactttcgccacaatgacctttgcaggcgacacaccgcagctggcgaacgtcaaagcggtggatgatatctacccgatgtatggcgatctgcaaactaatccccctggcctgaaaccgcaggcgggcagcgtattgctggccccacgcctgatggcactgcttaacctgaaaacgggcgacaccattgacgtgggcgatgccaccttgcggattgccggagaagtgattcaggaaccggattccggttttaaccccttccagatggctccgcgtctgatgatgaatctggcggatgtcgataaaaccggagccgtgcagccggggagtcgggtcacctggcgttataaattcggcggcaacgagaaccagctcgacggctatgagaaatggttgttacctcagcttaaacccgaacaacgctggtacggtctggaacaggacgaaggcgcgctggggcgaagcatggaacgcagccaacagttcctgctgcttagcgcgcttctgaccttgctgctggcagtggcagcggtggcggtagcgatgaatcattactgtcgcagtcgctacgatctggtggcgatcctcaaaacgctgggggcagggcgagcgcaactgcgtaagctaatcgtcggtcagtggttgatggtgctgacgcttagtgccgttaccggtggggccataggcctgttgttcgaaaacgtgttgatggtgctgctcaagcccgttctgcctgctgcactaccgccagccagcctctggccgtggctgtgggcgcttggcaccatgacggtcatcagcctgctggtggggctacgaccatatcgcttgttgctggcaacgcagcctttacgcgtattacgtaatgatgtggtagcgaacgtctggccgctgaagttttatctgccgattgtcagtgtggtggttgtgctgctgctcgccggattaatgggtggcagcatgctgctttgggcggtgctggcgggcgcggtagtactggctttgctgtgcggtgtgctgggctggatgctgctgaatgtacttcgccgcatgacgctgaaaagcctgcctctgcgcctggcggttagccgcctgttacgtcagccgtggagtacgttaagtcagcttagcgcatttagcctctcctttatgctgctggcactgctgctggtgttgcgtggcgatctgctcgaccgctggcagcagcagctacctccagaaagcccgaactactttttaattaacatcgccacagaacaggtagcaccgctaaaagcgttcctcgcggaacatcagatagtcccggaaagcttttatccggtggtgcgggcgcggctgacggcgattaacgataagccgacagaaggtaatgaagatgaggcgcttaaccgcgaactcaatcttacctggcaaaatacgcggcccgatcataatccgattgtcgccggtaactggccgccaaaagccgatgaagtgagcatggaagaggggctggcgaaacgcttaaacgttgccctcggtgataccgtgacttttatgggcgatacccaggagttccgcgctaaagtgaccagcctgcgcaaagtggactgggaaagtctgcggcctaatttctattttattttccctgaaggggcattagacgggcaaccgcagagctggcttaccagtttccgctgggagaatggcaacggcatgttgacacaactcaaccgccagttcccgaccattagcctgttagatattggcgcgattttaaaacaggtcggtcaggtgctggagcaggtaagtcgggcgctggaagtgatggtggtactggtcaccgcctgcggtatgttgctgttgctggcacaggtgcaggtgggaatgcgtcagcgtcatcaggagctggtggtgtggcgcacactcggtgcggggaaaaaactgctgcgtaccacgttgtggtgtgagttcgccatgcttgggtttgtttccggcctggtggccgcaattggtgcggaaacggcgctggcagtgttgcaggcgaaagtgtttgattttccgtgggagccagactggcgattgtggattgttctgccgtgcagcggagcgctgctgctgagccttttcggcggctggctgggtgcgcgactggttaagggtaaggcgctgttcaggcagtttgcggggtgatgagagtccctcattaccgcgccttaacccattccgccacttccgcccactcaccgcgaaagacaactttttccgcttttttctcaagctgatagcgatacatcgggtcgtaatattcttcaagtaacggcaccagccaggccagatgaccgtcggtgctgccggtggtgagttgcgttgtcagtgctgcatccagccttgcagccagttcgttatagcgctgtagccccagccgacgcttaatcgcgctaagtccgtgatgcaggtattcgcaatactcctgccagccctgttcgtcgccgtacgcgtgggtaaaatcatgatgcatacgcaagaaatactcttcgttcaggcgctcaagacggatctcaaacggatcttctaccaccgcaatcgccgcctgagtcattcgctcgcgcaggcattccggcaggtgattgctaccgatcatccggctttcgtcttccagcacccacaggcgcaaattctgacgggcgtcggtttttagcatttcggcagccagcaggttttcaaaactcgcctggctaagttgtggttgtaacgtgcgaccaaacgcgctaccgcgatgacgcgccaacccttccagatcaacaccgttcggctgttgctgcactaacagcgttttaccgctgccggtacaaccgccaatcagcactatcggtttttgtgccagttcaatagtcgcctgaatcgcggtctggcgcagtgccttataaccgccttccaccagcggataatcaatccccgctgcatgcaaccagctttgcacaatatgactgcgctgaccgccacgggcgcagcagagaataccttgcggattttgcaggcacgctgcccgccaggcgtccatgcgctgctgacgaatttcacccgccaccagtttatgtcccagcgccagcgctgcgtcactgccttgctgtttatagcaggtgccaacggcggcgcgttcatcgttattcattaacggcagattgatagcggcgggcattgcgccgtgctcaaactcgataggggcgcgaacatcaataatgggcgtatcagcaatcagcagggcacgatagtcctgttccgtgtgtctctcttgcatagttaaaagtgaacctcaaatcagcttgcgcgctattttacgcgccaacgcgcaaggaaacttgatttttaactgcgtgggttgccgaaaatttctaaaaatccgctgatttccggcctgcgctgggtaaacaaggtcacaatatcttctaccgctttgccgctgccaaatttgcgccatgccagactcaatgggctaggagggcgcatcgttgggattacccggctgaccagttgttgattatcgatcatactctggcaaaggctttttggcaaaaaaccaatgccaacgcccgccagatgggcggcgattttcgtttccatatcgggaacaataatctctttttgccctggcaatcgccaggcgacgcgtttggttaaggtgcgggcgctgtcttcaatattgaccgccggaaagcgccgcaactgcgcttctgttagcggctcttcaacgttcgccagcggatgatccgccgccatgacaaagcgccattgcacgcttcctaagggatcaagactaaaggtatttgccagcgcctcagttcccgtgacgccgatagccaggctaaaaccttcgtacaataggctgtcccagacgcccatatagatttgtcgggagatgtgaaactgggtaaaggggtaacgctcattcagccacgccagcaactgggcgacggcctgggggttgtagagcaggttgttgatgacaatattcacctggcgttccacgccatcattcacctgttgcagctcgcttggcatactttccagccagctcagccagtctctggcctgggaaagtagatgctcgccagccgctgtcaacgtcacgctgcgagtcgtacggaaaaacagcgctactccggtattctcttccagaagtttaatgcgataactgatcgtcgccgtggttttacataatcgttctgccgctttactaaaacttcctgtttcagcaaccgcaatgaaagtccgcaaggtttctggatcgaacatcttcaggtatccccttttaaatccgcaagttgcgtgattttcttatcctctgatttatcagtatttttacatgataaccctgttcaatttgtggactaaatctagttttggaaaaatattccaacttttgtattgatgttgttctcttaaggttttagattgcctgttattgaaaccaagctgaccggtcggcggtggttgaacggaattatgttacaaggacaaaaagatgaaacttcaggtattaccgttaagtcaggaagcctttagtgcttatggcgacgtaatcgaaacgcagcaacgggattttttccatattaacaatggcctggtggagcgttaccacgatttggcgctggttgagattcttgagcaagactgtacgcttatcagcattaaccgcgcgcaaccggcgaatctgccgctgaccattcacgaactcgaacgtcatccgctgggtactcaggcctttatcccgatgaaaggtgaggtgtttgtggtggtcgtggcgttaggtgacgacaaaccagacctgagtacgctgcgggcgtttatcaccaacggcgaacagggagtgaattaccatcgtaacgtctggcatcacccacttttcgcctggcagcgcgtcaccgattttctgaccatcgatcgcggcggcagtgacaactgtgatgttgaaagtattcctgaacaggaactctgttttgcgtgacgcctgcaaccgacttgcataagataaactaattgttcattgtttatgctcacttgtaggtcggagttaacgtaggtatgacggaagttagacggcgcggcaggccaggacaggcggagcctgtggcacagaagggcgcacaggcgttagagcggggaattgcgattctgcaatatttggaaaaaagtgggggaagtagcagcgttagcgatatttctctcaatctggatttgccgctctccacgacctttcgcttgctgaaggttttacaggcagcggattttgtctatcaggacagtcaattaggctggtggcatataggattaggtgtctttaacgtcggtgcggcgtacatccataaccgcgatgtcctctccgtcgccgggccgtttatgcgccgcctgatgttactttccggcgaaacggtcaatgtcgcgatccgtaacggcaatgaagcggtattaattggtcagttagagtgtaaaagcatggtcaggatgtgtgcgccactgggcagtcgtctgccactgcatgcttccggtgcgggcaaagcgctgctttatccgctggcggaagaggagttgatgagcatcattctgcaaaccggtttgcagcagtttacgccaactacgcttgtggatatgcccaccttgctgaaggacctggaacaagcgcgtgaactgggctataccgtagataaagaagagcatgttgtaggtctgaattgcatagctagtgcaatttacgatgatgtcggtagtgttgttgccgctatctccatctccgggcctagtagtagactgacagaagatcgttttgtcagtcagggtgagctggtcagagacaccgcccgcgatatcagcacggcgttgggactgaaagcacatccataatgtctgtcgcatcccgctctgcggagcgggtttttttgacaaaatttgaaagttggaaaaattttccaataaatagaggtaggaataaaatggcaaaaatgagagccgttgacgcggcaatgtatgtgctggagaaagaaggtatcactaccgccttcggtgttccgggagctgcaatcaatccgttctacagtgcgatgcgtaagcacggcggtattcgtcacattctggcgcgtcatgtggaaggtgctagccacatggcggaaggttatacccgcgcaacggcagggaatatcggcgtatgtctggggacttccggtcctgcgggcacggacatgatcaccgcgctctattccgcttctgctgattccattcctattctgtgcattaccggccaggcaccgcgcgcccgtctgcataaagaagattttcaggccgtagatattgaagcaattgctaaaccggtcagcaaaatggcggttacagttcgtgaagcggcgctggtgcctcgcgtgctgcaacaggcatttcacctgatgcgttctggtcgtccgggtccggtactggtggatttaccgttcgacgttcaggttgcggaaatcgagtttgatcctgacatgtacgaaccgctgccggtctacaaacctgctgccagccgtatgcagatcgaaaaagctgtagaaatgttaatccaggccgaacgtccggtgattgttgccgggggcggggtaattaatgctgacgcagctgcactgttacaacagtttgctgaactgaccagcgttccggtgatcccaacgctaatgggctggggctgtatcccggacgatcatgaactgatggccgggatggtgggtctgcaaaccgcgcatcgttacggtaacgcaacgctgctggcgtctgacatggtgtttggtatcggtaaccgttttgctaaccgtcataccggcagcgtagagaaatacaccgaagggcgcaaaatcgttcatattgatattgagccgacgcaaattggtcgcgtgctgtgtccggatctcggtattgtctctgatgctaaagcggcgctgacactgctggttgaagtggcgcaggagatgcaaaaagcgggtcgtctgccgtgtcgtaaagaatgggtcgccgactgccagcagcgtaaacgcactttgctgcgcaaaacccacttcgacaacgtgccggtgaaaccgcagcgcgtgtatgaagagatgaacaaagcctttggtcgcgatgtttgttatgtcaccaccattggtctgagtcaaatcgctgcggcacaaatgctgcatgtctttaaagaccgccactggatcaactgtggtcaggctggtccgttaggctggacgattccggctgcgctaggggtttgtgccgctgatccgaaacgcaatgtggtggcgatttctggcgactttgacttccagttcctgattgaagagttagctgttggcgcgcagttcaacattccgtacatccatgtgctggtcaacaacgcttatctggggctgattcgtcagagtcaacgcgcttttgacatggactactgcgtgcaactcgctttcgagaatatcaactccagtgaagtgaatggctacggtgttgaccacgtaaaagtagcggaaggtttaggttgtaaagctattcgggtcttcaaaccggaagatattgcgccagcctttgaacaggcgaaagccttaatggcgcaatatcgggtaccggtagtcgtggaagttattctcgagcgtgtgaccaatattagcatgggcagcgaactggataacgtcatggaatttgaagatatcgccgataacgcagcggacgcaccgactgaaacctgcttcatgcactatgaataagggagataaataatgttacgtttctctgctaatttaagcatgttatttggagaatatgattttctcgcccgttttgagaaagctgcgcagtgtggttttcgcggcgttgaatttatgtttccttatgactacgacattgaagaattaaaacatgtgctggcgagtaataaactcgaacatacgctgcacaatttaccggcgggtgactgggcggcgggggagcgcggtattgcctgtattcctggccgtgaagaagagtttcgggatggcgtagcagcagcgattcgttatgcccgtgcgctgggtaataaaaaaattaactgtctggtcggtaaaacgccggctggtttcagcagtgaacagattcacgcaacgcttgtagaaaacctgcgttatgccgcgaatatgctgatgaaagaagatattttattactgattgaacctattaaccattttgatattcctggtttccatctcaccggaactcggcaggcgctgaaattgattgatgatgttggttgctgcaatttgaaaattcagtatgacatttatcatatgcagcggatggaaggtgaattaaccaacaccatgactcagtgggctgataaaattggtcacctgcaaattgccgataatccgcatcgcggcgaaccgggaaccggagaaattaattatgattatctctttaaggtaatcgaaaattctgactacaacggttgggttgggtgtgaatataaaccccaaaccaccacggaagccggtttacgctggatggatccgtaccgttaaaacgtaacgctattcagacaatgcttttttaggccgctaagttggcaggggatcgtgttgtctgaattcaggaaaagcgaaatttaaaagaggttaattatgaaactgggatttattggcttaggcattatgggtacaccgatggccattaatctggcgcgtgccggtcatcaattacatgtcacgaccattggaccggttgctgatgaattactgagtctgggtgccgtcagtgttgaaactgctcgccaggtaacggaagcaagcgacatcatttttattatggtgccggacacacctcaggttgaagaagttctgttcggtgaaaatggttgtaccaaagccagcctgaagggcaaaaccattgttgatatgagctccatttccccgattgaaactaagcgtttcgctcgtcaggtgaatgaactgggcggcgattatctcgatgcgccagtctccggcggtgaaatcggtgcgcgtgaagggacgttgagcattatggttggcggtgatgaagcggtatttgaacgtgttaaaccgctgtttgaactgctcggtaaaaatatcaccctcgtgggcggtaacggcgatggtcaaacctgcaaagtggcaaatcagattatcgtggcgctcaatattgaagcggtttctgaagccctgctatttgctagtaaagccggtgcggacccggtacgtgtgcgccaggcgctgatgggcggctttgcttccagtcgtattctggaagttcatggcgagcgtatgattaaacgcacctttaatccgggcttcaaaatcgctctgcaccagaaagatctcaacctggcactgcaaagtgcgaaagcacttgcgctgaacctgccaaacactgcgacctgccaggagttatttaatacctgtgcggcaaacggtggcagccagttggatcactctgcgttagtgcaggcgctggaattaatggctaaccataaactggcctgatacccgcaataaaaatggccgatatcagaaaatgaatcggccagcaatattaaaaaagaaagcagccaaagatgttgctagtgtattaaaaataatatttttattttatttgttcctcatagctagattaaaacaacgttatagcatacgtgaaattaagagggatttatggaacatcagagaaaactattccagcaacgcggctatagcgaagatctattgccgaaaacgcaaagccagcggacctggaaaacatttaactattttaccttatggatgggtagcgttcataacgttcccaattatgtgatggtcggcggcttttttattctcggcttgtctacctttagtattatgctggcaattatcctcagcgcctttttcattgccgcggtaatggtattaaacggtgctgcgggcagtaaatacggtgtgccttttgccatgatcctgcgtgcttcttacggtgtacgtggtgcactgtttcccggattattaaggggcggaattgccgccatcatgtggtttggtttgcaatgttacgcggggagtctggcctgcttgattctgattggcaaaatctggccgggatttttaactctcggtggtgatttcactctgttaggcctttctctaccgggcttaattactttcttaatcttctggctggtcaacgttggtataggttttggcggtggcaaagttttaaataaattcactgccattcttaacccgtgcatctatatcgttttcggcggtatggcgatttgggcgattagtctggtcgggatcggtccaatctttgactacattccgagcggtattcagaaagcagaaaacggtggcttcctgttcctggtggtgattaacgcggtagttgcggtctgggcggcaccggcggtgagcgcatccgactttacgcaaaacgcccacagctttcgtgagcaggcgctggggcaaacgctgggtttagttgtggcctatattctgtttgcggtcgccggggtatgtattattgccggagccagtattcactacggcgctgatacctggaacgtgctggatattgttcagcgttgggacagcctgttcgccagcttctttgcggtactggttattctgatgacaactatctccactaacgcgaccggtaatattattccagccggttatcagattgccgccattgcaccgacaaaactgacctataaaaacggcgtactgattgccagtattatcagcttgctgatctgcccgtggaaattaatggaaaatcaggacagcatttatcttttcctcgatattatcggcggaatgcttggtccggtaattggtgtcatgatggcgcattattttgtggtgatgcgcggacaaattaatcttgatgaactgtataccgcacctggcgattataaatattacgataacggttttaacctcactgcgtttagtgtaactctggtggccgttattttatctcttggcggtaagtttattcactttatggaaccgttaagccgtgttagttggtttgtcggcgtcatcgtcgcctttgcggcctacgccttattaaagaaacgtacaacagcagaaaaaacaggagagcaaaaaaccataggttaattaatcccgatattgaacattgagttaaaaaccaatctgtattttacaaggagtttgttatgtcttttgatttaatcattaaaaacggcaccgttattttagaaaacgaagctcgcgttgtagatatcgccgttaaaggcggaaaaattgctgctatcggtcaggatctgggcgatgcaaaagaagttatggatgcgtctggtctggtggttagcccgggcatggttgatgcgcacacccatatttctgaaccgggtcgtagccactgggaaggttatgaaaccggtactcgcgcagcggcaaaaggtggtatcaccaccatgatcgaaatgccgctcaaccagctgcctgcaacggttgaccgcgctagtattgaactgaagttcgatgccgctaaaggcaagctgactattgatgcggcacaactcggtggcctggtgtcttacaacatcgaccgtctgcatgagctggatgaagtgggcgttgtcggcttcaaatgcttcgttgcgacctgtggcgatcgcggtatcgacaacgacttccgtgatgtaaacgactggcagttcttcaaaggtgcgcagaagctgggcgaactgggtcagccggtgctggtgcactgcgaaaacgcgctgatttgtgacgaactgggcgaagaagcgaagcgtgaaggtcgcgtaaccgctcatgactatgtggctagccgtccggtatttaccgaagtggaagcaattcgccgcgtactgtatctggcgaaagttgctggttgccgtctgcacgtttgccacgtcagcagcccggaaggtgttgaggaagtgactcgtgcacgtcaggaaggtcaggacgttacttgtgaatcctgcccgcattactttgtactggataccgatcagttcgaagaaatcggtactctggcgaagtgtagtccgccgatccgcgatctggaaaaccagaaaggcatgtgggaaaaactgtttaacggtgaaatcgactgcctggtttccgaccactctccatgcccgccggaaatgaaagccggtaacatcatgaaagcatggggcggtatcgccggtctgcaaagctgcatggacgtgatgttcgatgaagcggtacagaaacgcggtatgtctctgccaatgttcggcaaattaatggcgactaacgcagcagatattttcggtctgcagcaaaaaggccgtatcgccccaggaaaagatgccgacttcgtcttcattcagccgaatagcagctatgttcttaccaatgacgatctggaatatcgccacaaagtcagcccgtatgttggccgtaccattggcgcgcgtatcacgaaaaccatcttacgtggtgatgtgatttacgacattgaacagggcttccctgttgcgccgaaaggtcaatttatccttaaacatcagcagtaatctggcccctgcaatgcccgtccttgcggcgggcattctccggttaaggtgtgtttatgttcaattttgcagtcagccgcgaaagcctgttaagtggatttcagtggtttttctttattttttgcaacacggttgtggttcctcctacgctactttctgcttttcagttgccgcaaagtagcctgcttacgctcacgcaatatgcttttcttgctaccgcactggcctgcttcgctcaggcgttttgcggtcatcgtcgcgctattatggaagggccaggtggcctgtggtggggaaccatccttactatcacccttggtgaagcaagccgcgggacaccgatcaacgatatcgccaccagcctggcagtggggattgcactctccggcgtgctgacgatgttgattggttttagcggattaggccatcgcctggcacggttatttacgccgagcgtgatggtcttgtttatgttgatgctgggcgcgcagctgaccactatctttttcaaaggtatgctcgggctgccgtttggcatagccgacccgaattttaaaattcagttaccgccgttcgcgctcagcgtggcggtgatgtgcctggtactggcgatgattatcttcctgccgcaacgttttgcccgttatggcctgctggtcggcaccataaccggctggttgttgtggtacttttgctttccttctagccacagcctctccggtgagttgcactggcagtggttcccgctcggcagtggcggtgctttgagcccgggaattattctgacggcggtgattacaggtctggtaaatatcagcaatacctacggtgcgattcggggcacggatgttttttatccgcagcagggcgcagggaatacgcgttatcgtcgtagctttgtggcgaccggatttatgacgctgataaccgtaccgctggcggtaattccatttagtccgtttgttagttccattggtttattaacccagactggcgattacacgcggcgtagctttatttatggcagcgttatttgcctgctggtggcgctggttcctgcactcacgcgactgttttgcagtatccctttacccgtgagtagtgcggtcatgctggtttcttatctgcctttactcttttccgcgctggtgtttagccagcaaataacgtttaccgctcgcaatatttatcgactcgcattgccgttatttgtcggcatatttttaatggcattaccgcctgtgtatctgcaagaccttccattaacgcttcgtcctctgctcagtaacggcttattggtcgggattttactggctgttcttatggataaccttattccgtgggaacgcatcgaataatttgttgaaaaaggattgataatgaagattgtcattgcgccagactcttttaaagagagcttaagtgcagaaaaatgttgtcaggcaattaaagccgggtttagcaccctctttcccgatgcgaactatatctgtttgccgatagcggatggcggcgaagggacggtggatgcgatggtcgccgcgacgggcggcaacatcgtgacgcttgaagtctgcgggccgatgggcgaaaaagtgaatgctttttatggccttaccggcgacgggaaaacggcggtgattgagatggcggcagcaagtggcctgatgctggtcgcgcctgaaaagcgtaatccgttgctggcctccagttttggtacgggggagttaattcgtcatgcgctggataacgacattcgccatattattctcggcattggcggcagtgcgacggtcgacggcggtatgggcatggcgcaggcgctcggtgtgcgtttccttgatgccgacggtcaggcgctggcggcaaacggtggtaatttagcgcgcgtggcaagcattgagatggatgaatgcgatccgcgtctggcgaattgccatattgaagtagcatgtgacgttgataacccgctggtaggggcacgcggcgcggcggcggtgtttggcccgcaaaaaggggcaacgccggagatggtcgaagaacttgaacaggggctgcaaaattacgcccgtgttttacaacagcaaactgaaattaatgtctgccagatggcgggcggcggcgctgcgggcggtatgggtattgcggcggcggtatttctcaatgcggatattaaaccgggcattgaaattgtgttgaatgcggtcaatcttgcgcaggcagtgcagggcgcagcactggtgattaccggggaagggcgcatcgacagccaaacggcaggcggtaaagcgccgctgggtgtggcgagcgtggcgaagcagtttaatgtaccggtgattgggattgctggcgtattgggtgatggcgtggaagtggtgcaccagtacggcattgacgcggtattcagcattttgcctcgtctggcacctttagccgaagtgctcgccagcggtgaaaccaatctcttcaacagcgcgcgaaatattgcctgcgccattaaaataggtcagggaattaaaaactaacccttacctttaaagcggatgcgatttatatcgcataagagtgcagtactcatgccggatgcggcatgagtaccatatccttcctgaaaatcgcgcaaattctatatattgcagagatcatgtaggcctgataagcgaagcgcatcaggcaatgttacaaaaaaagccacggtataaaccgtggcaaaatccaacatagctaaaaataatcaggcgagtggtatgacttaaatctctacgtcgcggttacaatctttgctgtaaatatagctgaacgcttcaccacgccctacaccataaccagcctgtaaagaataagcgcccataaagatgtaatcgccttttttcaccgggatccagttattgtcgaggttataaaccccctgaccggaaagaatataggcaccgtgttcctgaacgtgtgtttcgatataaccgtggctggcacctggtgcaaaagagaggatatgcatgttcatatcaaaacctaactctttgggcagaaaatccagcagaataacatcgtccatgccttcataatgaatgcgttccagttcgctggcattgccagaaaccagccacggtgcatagccttctaccggaacatagcggcgcttatataaaaagatttggctgtcttcggcctgggcgttaacaaacgtcattaaggagcctggcgggcaataaagatagccaccttcgcttaaggcaaatgttttgccttcggctttggcagtgatatttccagagatcacatacaggaacgtttcaatgccttcgccaccgaagccctgttggttgccaccgttttgatgcagtgtgaccagataatcaacaaaagaggcacccagctttggcgtggagaggattgtcgcgtcacaattttcaaagcccggaataatattttttaccagaccatccggggttaacagtgcgaaattaccgtgtttaacaatcgcacggttagccagtaaatcttcgcggtaaccggtgacgttatttaaatatcccatttatgactccttatttctgccaggcaagttgataaagcatgagtgccaacgttttgaccccttcggcaaggtcggtaatattggtgcgttccgccgggttatggctgatcccgttgatgctggggataaaaatcatgcaggttggtacgcgaggcgcgaaaatttgcgcgtcgtgcccggcaccactgtgcatcacccggtaattcagtttttctctttcacacaattctgtcagggtggcgaccagctccttattcatcggcacgggttcttcgtccatccataaatcgatatcaataccaatgtccatttcatcgcaaatcgcccgcatgtcgttttctaactgttgggtgaaatcgcgcagcacggcagcgtcggtatgacgacaatcaatggtgaacgtggttttacccggcaccacatttaccgtattcgggcgcggctctactttgccaaaggtcagaaccagcggatcgcccatccttttcgctttttcgacgctctgatggcaaatgcgactgaaagcgtaaactgtatcacgacgataacccatcggcgtggtgcctgcatggttactttcgccgttcagcgttaccgtataacgacgctgcccgacaattgcattcaccacgccaatactttgcccattactttccagcacacagccctgttcaatatgcagttcaacaaaggctttaatatcctgacgcggagttagtggggcgttcggaagagtaaatccgcaagccttcatcgcatcgacaaaactatttcctttggcatcacagatattccgcacgtcgtcaggattcgccagcccaaaaatatttttactgccccagaagacatacgggaagcggctgccttcttcttctgccatcgccaccacttcgaccgtacgtagcggcgcgccgtattgcgttttcagccagtcaattgccagccacgccgccagcgcgccgaattgcccgtcaaggttaccgccgttaaccacggtatcgatatggctaccgctcagaaccacttcctgtggatattcggtgccattcaggcgaccgtataaattccccacttcatcgaaacgtgtttccagcccgcttgctgccattctttttttaaattgctgctgggtttccagccattccgggctataaagtaaacgggtcatcccacccgctgggtcagcgccaaaagaggaaagccagggcagcgtttcttctatagcttgacggaaatgtgtaatcataagaaagtcctgtctcaataattattgcgcaaagggatttttcgtttcgtaactcgtgttataaagcgcgtcggaaattaaatactggtaaatatcatcaacaatttcgatgccttcgacggcggctttgcgttgtttaatatcctgatcctgtccgggataataaacctgattaaaaccgggcgcgggggtaatggcatttaattcgcgcatggtctggctaagatgttgacggaataattcgctggaggagaaaaagttcggattaataactatatgtaattgccccaaattacgccctgcgtgtaaatcgtcatacatgctactaacctgtcgcccgaacggtaagccgagtaagacgccactgaggacgtcaatcatcatcatcaggccatacccttttggcccggcggcggggagcagagcatgtaccgcgaacggatcggttgttggtacaccgtttttatcgaccgcccaggtatccgggatagacatattacggctgcgggcgtcgagcacttttccccatgcctgtacggtagtcgccatatcaaaggtaaggatctcgtcgccttctcccggcgcggcaaaggccagggggttagtaccgtagtaaatttccgcgccgccaaacggcaccaccattggatcggactggcacatgctaatgccaatgaatccggcgcgggctgcctgctgcacaaaataagagattgcgccgctgtgacccatccggctgataccgaccaccgcaacgccattttgctgggcggttttgatggcatgttccatacccattttcgccgcgacctgtccggcggcattgtcggcatgtaaaattgcgctgcacggcccggtttcctcaagacgaaactccggttcgcggttggtgccgcctttactaatgcgttccgcgtagtattccacgcgcaccgcgccatgagagtggatccctctggcatcggcgtaaaccaatacttcagccacggttgcagcgtgctcacgttttaacccagcctggcagagtttattctcaattagctggtggagtgtttcccgactgattttcatctgtcttcctttttaacgacggtgtgaagcatgactgcaattaacatacagggaaaatatctggattatgtgatccagacaggcaaaaaaatatagttagaatttatttgataatccgctcacttttaacctgatttttaaaacaacaacgcttattaaaaaataatgagtaatagcctggtggttatttgaattcttttgttaataattcctgtgtgatattcatcaccttatttactcgttgtcatcgataccgtaatcgccacattaacactgctcgtgcaattgccatgggtgcaatttttaaggagttgttatgatccacgcctttattaaaaaagggtgttttcaggatagcgtcagtttaatgattattagtcgaaaactcagcgaaagtgaaaatgttgatgatgtttccgtaatgatgggtacgcccgccaataaagcgttattagataccacaggtttctggcatgacgattttaataacgccacgccgaacgatatttgcgtggcaattcgtagcgaagcggcggatgcggggatcgcgcaggcgattatgcagcagcttgaagaggcgctaaaacaactggcgcaggggagtggcagcagccaggcgttgacgcaggtgcgtcgctgggacagtgcctgtcagaaattacccgatgccaatctggcgctgattagtgtggctggcgagtatgcggcggagctggcaaaccaggcgctggatcgcaacctcaacgtgatgatgttctccgataacgtcacgctggaagatgaaatccaacttaaaacccgcgcgcgggaaaaaggcttgctggtgatggggccggactgcggtacgagcatgattgccggcacaccgctggcttttgctaacgtgatgccggaaggcaatattggcgtcattggcgcttccggtaccgggattcaggagctgtgtagccagattgcgctggcaggggagggaattactcacgcgattggccttggcgggcgcgacctcagccgtgaagtgggcggcatcagtgcgctaacagcgctggaaatgctcagtgcagacgagaaaagcgaagtgctggcatttgttagtaaaccacctgccgaagctgtgcgtctgaaaattgttaatgccatgaaagcaaccggcaaaccgacggtggcgctgtttttaggttataccccggcggtggcccgcgacgagaatgtctggtttgcctccagcctggatgaggccgcacgcctggcttgcctgcttagtcgcgtcacggcgcgacgtaacgcaatagcgcctgtcagcagcggatttatttgcggtttgtataccggcggtacgctggctgccgaagcggcgggattacttgccggacaccttggcgtggaagccgacgatacccatcaacatggcatgatgctggacgccgatagccaccagattattgacctcggcgatgatttctacaccgtcgggcgtccccatccgatgatcgacccaaccttacgcaaccagttaattgccgatctcggcgctaaaccgcaagtgcgcgtgttgctgcttgatgtcgtgattggcttcggtgcgaccgccgatcctgccgccagcctggtgagcgcctggcaaaaagcctgtgccgcgcgtttagataatcaaccactgtatgccattgccacggtgacaggcactgaacgtgacccgcaatgccgcagccagcaaatcgccacgctggaagatgcggggattgcggtcgtgagtagcctaccggaagccaccttgctggcggcagcgttaattcatccgctcagccctgccgcacagcaacacacaccgagtttactggaaaacgtcgccgtgattaacatcggattacgcagctttgcgctggagctacaaagcgccagcaaaccggttgtgcattaccaatggagcccagtcgccggtggcaataaaaaactggctcgtttattagaacgtttgcaataaggggttcccatgtttacatcagtggcgcaagccaatgctgcggttatcgaacaaattcgtcgcgctcgtccacactggctggatgtgcaaccggcttcttcacttatcagcgaactaaacgagggcaaaacactgcttcacgccgggccgccaatgcgctggcaggagatgaccggacccatgaaaggggcgtgcgtgggcgcatgtctgttcgaaggttgggcgaaagatgaagcgcaggcgctggcaatactggagcagggggaagtgaacttcattccttgtcaccatgtgaatgccgtcgggccaatgggcggtattacttctgccagtatgccgatgctggtggttgagaacgtgaccgacggcaaccgggcgtactgcaacctcaacgaaggtatcggcaaagtgatgcgttttggcgcttacggcgaagatgtcctgactcgccatcgctggatgcgcgatgtgttaatgccagtattaagcgcggcgctggggcgcatggagcgcggtatcgatctcacggcgatgatggcgcagggcattacgatgggcgatgagttccatcaacgcaatattgcttcctctgcactgttaatgcgtgcgctggccccacaaattgctcgcctcgatcatgataaacagcacatcgccgaagtgatggatttcctcagcgtgaccgatcagttcttcctcaacctcgcgatggcttactgcaaggcggcgatggatgctggcgcgatgatccgcgcaggcagcatcgtcacggcaatgacccgcaacggcaatatgttcgggattcgggtaagcgggctgggcgaacgctggtttactgcgcctgtaaacactccgcaaggtctgtttttcaccggcttctcgcaggagcaggcgaacccggatatgggcgatagcgcgattaccgaaacctttggtatcggaggtgcggcaatgatcgcagcgcctggcgtaacgcgctttgtcggtgcgggtggcatggaagcggcaagagcggtatctgaagagatggcggaaatttaccttgaacgcaatatgcagttgcagatcccaagctgggattttcagggcgcgtgcctggggctggacattcgtcgcgtggtagaaaccggcattacgccactcatcaataccggtatcgcccataaagaggcggggatcgggcagattggcgcaggcaccgtgcgggcaccgctggcgtgctttgaacaggcgctggaagcactggctgaaagcatgggtattggttgaggaacgcgcaatgacgatcatccatcctctgcttgccagtagtagcgcaccgaattatcgccagtcctggcggttagcgggagtgtggcggcgggcgattaacctgatgacggaaagcggcgaactgttaacgttgcatcgtcagggtagtggtttcggccccggaggatgggtgcttcgccgtgcgcaattcgatgcgttatgcggtggattatgcggcaatgaacgaccacaggttgtggctcaagggattcgcctcgggcgtttcacggttaaacagccacagcgttattgtttgctgcgtattacgccgcctgcgcatcctcaaccacttgcagctgcatggatgcaacgcgcggaggaaaccgggcttttcgggccactggcgttggcggcaagcgatccgctgcctgctgagttacgccagtttcgtcactgttttcaggccgcgctcaatggcgttaagaccgactggcggcactggctgggtaaaggccccggattaacgccgagtcatgatgacacgctgagcggaatgctgctggcggcctggtattatggcgctttagatgcgcgctccggtcgtccgttttttgcctgttccgacaatctgcaactcgttaccacagcggtgagcgtcagttatttacgttatgccgcgcaaggatatttcgccagcccactcctgcactttgttcatgctctgagttgcccgaaacgtaccgctgttgcgattgatagcctgctggcgctggggcatacgagtggggcagatacgctgctggggttctggcttggccaacaattattacaaggaaaaccatgaaaacactggttgtggctcttgggggcaacgccttactccagcgcggtgaggcgctgacggcagaaaatcaatatcgcaatatcgccagtgctgtacccgcgctggcacgcctggcccgttcttatcggttggcgattgttcacggcaacgggccgcaggtggggctgctggcattgcagaatctggcgtggaaagaggtagaaccgtatccgctggatgtgctggttgcggaaagccaggggatgattggctatatgctggcgcagagtttgagcgcacagccgcagatgccgcccgtgacgacggtgctgacgcgcattgaggttagccctgatgatccggcgtttttgcagccagagaaatttattggtccggtttatcagccagaagaacaagaggcactggaagcggcttacggctggcagatgaaacgtgatggtaaatatttgcgccgggtggtggcgtctccgcaaccgcgtaaaattctcgacagcgaagccatcgagttgttgctcaaagaggggcatgtggtgatttgcagtggcggcggcggtgtgcctgtgacggatgacggagcagggagtgaagcagtgattgataaagatctcgccgctgcgttgctcgccgagcagattaatgcagatggactggtgatcctcaccgatgctgatgcggtatatgaaaactggggaacgccgcagcaacgtgccattcgccatgccacaccggatgagttagcgccatttgccaaagccgatggtagcatggggccgaatgtaacggcggtgagtggttatgtcagaagccgtggtaaacccgcgtggattggggcgttaagccgaattgaagagacgctggcgggcgaagcggggacctgtattagcctgtaatcgtaggcattagacatttgtgcctgatgcgacgcttgacgcgtcttatcaggcctacaaccggtgccgcatccggcaattggtgcacaatgcctgatgcgatgcttgacgcatcttatcaggcctacaatgggtaccggatcggtaggccggataaggcgtttacgccgcatccggcaagaatagagcaccagttaaccgaacttactctgcgcccaaatcacgccgctggcatattccggcggcagcagcgggattaaggcttccagcgtcgcagtcagacggcttgtgtcgctgtcggtcaaattcagatgccccactttacgccccggacggacttctttgtcgtaccagtgcagatgcaccagcggcagtttcagccagtcataattcacatcgctaccaatcagattgatcatcacgctcggattattcaccactggttgcggtaacggcagatcggtaatcgcccgcagatgcagctcaaactggctgatgctggcaccgttttgtgtccagtgaccgctgttatgcacacgcggtgccagttcgttgatcaacagaccttgcggggtgacaaaacactccatcgccatcacgcccacatagcccagctcctgcataatcgcgctcagcatctcttcggcttgcgcctgctgctgtgcgttggcctgcggaaaagcgacgctggtgcgcaaaataccgtcctgatgcaggttatgcgtcagcggataaaacacggtgctgccatcaaagccgcgcgcgccaaccaggctcacttcaccagagaagttaatgccctgctcgacaatacattcgccgtaacactctgccggtaactgttcggtttcatttgcgcgtaaacgccattgaccgcgaccgtcataaccaccagtgcgacgcttaacaatcgccagctcacctaaacgatcaaacaccgcaggccactcgctgcgttcggcaagtaactgccacggtgcagtcggcaggtggagcttatcgaaaagctgcttctgagtcagacggtcagcaataatcgggaacacatcgcggttcacaaaggccggatggcgcgccagctcgcgggttaatgcggtttccggccagcgttctatctcagcggtaatcacgctttgttgaaaaggcaccgccgccggttcagcgtccagcccgactggccagacagcaatgcctaacggttcgcctgcctgacgcagcatacggcctaactgcccgttaccgaggacgcaaacctgtttcatgccgcacctcgcgggtccgggttttccagcacttcgtcggtctgggctttgcgccagtcattcagacgctggtgcagttctttatcatgagtcgcaagaatttgtgctgccagtaacgccgcgtttgccgcgccagctttaccaatcgccagcgtacccaccggaatgccgcgcggcatttgtacgatggagtagaggctatcgacaccgctcagtgcggcgctctgtactggcacgcccagcaccggcaccagcgttttggcggcaatcatgcctggcagatgcgctgcgccgcctgcgcccgcaataatcacctgataaccgttctcttcggcgctttcggcgaagctgaacagtttatcgggggtgcggtgagcagaaaccacttcaacgtggtgcgggacattcaggatttcgaagatttcggcggcgaactgcatggtagcccagtcgcttttggaccccatcacgatggcgacacgcgccggattattgcgggaagacatgcgtcttaaaactcctgtggtgcacaactctcggctttagagggcacagagaatagcacggaaagagagcaaggaaaacggttgcgtggctgtgaaatcagcaaagttgcgggttttttaaaacggaaaatgaatcagctcaacgtcatccgccgtgactttcaccatactaccttccgtatgccaggcacccagtaccacgcgaaaagcaggttgctgattggcgataagttcatgcaccgccgggcgatgggtatgcccgtggatcagccattgcacctgatgtttttccatcgcactgaccaccgcgttttggttaacgtccatgatcgccaggcttttactgctgttggcttctttgctgttcgcgcgcattcgcgcggcaatgcgtttgcgcacaaacaacggcagggcgaggaatagcgtctgcagccagggtttgtggaccttggcgcgaaaagcctgataacccgcgtcatcggtgcacagcgtgtcgccatgcataatcaacacccggcgaccataaagttcgagcaccttttcttccggcaataacgtcatgccactttcacgggcaaagcgtttgccgagcagaaaatcacggttgccatgaatgaaataacagggaacgccggaatcggacaccgctttgatcgccgccgccatcttgcgatggagtgggttgggatcgtcgtcgccaatccatgcttcaaacagatcgccaagaatatacagcgcgtcggccttgcgggcttcccccgctaaaaaacgcagaaaaccggcggtgatcgccggttcttccacgcagagatgaagatctgcaataaagagtgtcgccacgattactcgctaacggtcacgctttcaatgataacgtcttcttttggcacgtcctggtgcataccgctacgaccggttgcaacacctttgattttgtctaccacgtccatgccgtcaaccacttcagcaaacacgcagtagccccaaccttgcaggctttcgccagagaagttcaggaagtcgttatcaaccacgttgatgaagaactgtgcagttgcagagtgcggagcctgagtacgtgccattgccagcgtaccacgggtatttttcaggccgttgttggcttcgtttttgatcggttctttggtggctttttgtttcatgcccggttcaaaaccgccgccctgaatcataaagccgttgataacacggtggaaaatggtgttgttgtaaaaaccttcgcggcagtagtccaggaagtttttaactgtttcaggtgctttatcgtcaaaagttttgatgacaatatcgccgtgattggtgtggaaagtaaccatttttgcatcctgttccgtttgattggtgcttcaacccagttcgggtcatatatagggtggtgttatagcataaccgcacgatcggatcatcacgcaatgtatgctgattcgcgcgggaaatatgggtattatacgcaactcaattacccacacatgtctaaacggaatcttcgatgctaaaaatcttcaatactctgacacgccaaaaagaggaatttaagcctattcacgccggggaagtcggcatgtacgtgtgtggaatcaccgtttacgatctctgtcatatcggtcacgggcgtacctttgttgcttttgacgtggttgcgcgctatctgcgtttcctcggctataaactgaagtatgtgcgcaacattaccgatatcgacgacaaaatcatcaaacgcgccaatgaaaatggcgaaagctttgtggcgatggtggatcgcatgatcgccgaaatgcacaaagattttgatgctttgaacattctgcgcccggatatggagccgcgcgcgacgcaccatatcgcagaaattattgaactcactgaacaactgatcgccaaaggtcacgcttatgtggcggacaacggcgacgtgatgttcgacgtcccgaccgatccaacttatggcgtgctgagccgtcaggatctcgaccagctgcaggcaggcgcgcgcgttgacgtggtcgacgacaaacgcaacccaatggacttcgttctgtggaagatgagcaaagagggcgaaccgagctggccgtctccgtggggcgcgggtcgtcctggctggcacattgaatgtagcgcaatgaactgcaagcagctgggtaaccactttgatatccacggcggcggtagtgacctgatgttcccgcaccacgaaaacgaaatcgcgcagtccacctgtgcccatgatggtcagtatgtgaactactggatgcacagcgggatggtgatggttgaccgcgagaagatgtccaaaagcctgggtaacttctttaccgtgcgcgatgtgctgaaatactacgacgcggaaaccgtgcgttacttcctgatgagcggccactatcgcagccagttgaactacagcgaagagaacctgaagcaggcgcgtgcggcgctggagcgtctctacactgcgctgcgcggcacagataaaaccgttgcgcctgccggtggcgaagcgtttgaagcgcgctttattgaagcgatggacgacgatttcaacaccccggaagcctattccgtactgtttgatatggcgcgtgaagtaaaccgtctgaaagcagaagatatggcagcggcgaatgcaatggcatctcacctgcgtaaactttccgctgtattgggcctgctggagcaagaaccggaagcgttcctgcaaagcggcgcgcaggcagacgacagcgaagtggctgagattgaagcgttaattcaacagcgtctggatgcccgtaaagcgaaagactgggcggcggcggatgcggcgcgtgatcgtcttaacgagatggggatcgtgctggaagatggcccgcaagggaccacctggcgtcgtaagtaattgcgctattgccggatgcgagttttcgcatccggttatcgtctgcgccaccacaacattcccatcagtagcatccccggcaaccacacccacatcaattcagaaataatcacctgatgcccgtacggcgtggtgtaacgagacaatgcaaacggcgcgacttttatcacctgccagggagcgaaaaagcgttcatcactccacggccacagccagccaacgcctttaccgccagtggttacgctatccagcaagctgtggcttagcaagctgacggttaaaaacagccagcagcgaatcagcccagccctgaaccatcggcgtccaataaacacacataacagcgggacaacaaacgcaaacaccaggctatgggtaaacccgcgatgaccaaaaacattgccgtaagcaacgccaaatttaaagctcaatacgtcggcgtcgggcagcatcgccaggatgattccggcaaataacagacgcggagggatgactttgctacccaaccctaaaccaatgcataggggaacggcggcgtgcgtaataacggttggcatgatggtcgcttcggcaaaatgtcgatgctatcagcatggatgaacggggcgtagagggcaaaagtctgaaaagagaaccggcctgttgatacaggccgggaaagggatcaggcaacaacctgtacgctgtgacctgcaaaactcactgtctgaccggcgacgattttgcagcgtttgcgcgtttcaaccgcaccgtcgactttcacctggccttcggcaatcgcgattttcgcctgcgcgccgctttcgctccagccttccagtttcagcaagtcgcacagctcaacgtgcggatgtttacctaaagaaaatgtcgccatgttactcatcctgtggatcatgatattcaacgcacgcctgtagcgtgttttcaatcagcgtggcaaccgtcatcgggccaacgccgccgggaacaggcgtaatgtaactggcgcgtttagccgcgtcttcaaacacgacgtcgcccacaactttgccattttccagacggttgatgccgacatcaatcacaattgcgccttctttgatccagtcaccgggaataaagcctggcttgccaacggcaacgatcaatagatcggcattttctacgtgatgacgcagatttttagtgaagcggtgagtcactgtagtggtgcaacctgccagcagcagttccatgctcatcgggcggccaacgatattgcttgcgccaatcaccacggcgttgaggccgaaggtatcaatgttgtaacgctcaagcagcgtgacgataccgcgcggggtgcagggacgcagacgcggcgcgcgctggcacagacgaccgacgttgtaaggatggaaaccgtccacgtctttgtccggatgaatacgttccagcactttgacgttatcaatacccgccggtaacggcagttgaaccagaatgccatcgatggtgttgtcggcattcagcgtatcgataagctccagcagctccgcttcgctggtggtttccgggaggtcataagagcgggagacgaacccgacttcttcacaagccttgcgtttgcttgcgacataaatttggcttgcagggttactacccaccagcacaacggccagtcctggtgcccgcagtccggctgcaatacgcgcctgaactttttgagcaacttcagagcgcacctgctgcgcaatcgttttaccgtcaataatctttgctgccatcagagagaggattccatctgttacgtagatcgaaggggatgcgcctattttgtcagaagcggggcgcgctgtcaggtttcgtttcagatttatcgcgtgaagcgacctcttgcgaaggtgaggcgcaccgtcgctgagactgaaagcttcatttttcgtccatgatggcgttgtaaatctggaactgatttatttccttgtctaaggattaagataatttaagaaatacctgacaatataaaaagaattttcagcctggtaatttaccgcttcaggtctatatttgtgttgaatatattttgcgcggaagtattcatctaacggggctctctattttttagaatagagtgcatattttcaattaagacattcttagaggataaaaaggaatttactactatcagtgtcttaaataaagtaatcggttatatacggatgtggagtcgataaatgagattgaaggaatatatatgaaattaagatttattagctctgcgctggctgccgcactattcgccgctacgggtagttatgctgccgttgtagatggcggtacaattcactttgaaggcgaactggtgaatgctgcctgtagtgtgaatactgacagcgcagaccaggttgtcacactcggtcaatatcgtaccgatattttcaatgctgttggtaatacctctgcattaattccattcaccattcagttgaacgactgcgatcctgttgttgccgctaatgctgccgttgcattttctggtcaggctgatgcaatcaatgataatttattggccattgcatccagtaccaatacaacaacagcaacgggtgtcggtattgaaatacttgataatacatccgcaattctcaaacctgatgggaatagcttcagtaccaaccagaacttgatccccgggaccaacgttcttcatttttctgcacgttataaaggcaccggtacaagtgcaagtgcagggcaagcaaatgctgacgcgacttttattatgagatatgaataatcaaaaccacgttgttttgaattatatatcacgtcttataacaaagtaatgtaccggttgtctgaagcggtatggtggcaatgtaaatcgaaatcatgttcactttgtatcatgccgctttattaaatgaaaagggaatgatgtgttgtaagaaaccaaagcaatcatttctttatattccttatttttgccgtcaggaatacacaaggcgtattaactatgatgactaaaataaagttattgatgctcattatattttatttaatcattagcgccagcgcccatgctgccggagggatcgcattaggtgccacgcgtattatttatcccgctgatgctaaacagactgcggtatggattagaaatagccataccaatgagcgctttctggtcaatagctggattgaaaacagcagcggtgtaaaagaaaagagtttcatcattacaccgccactgtttgttagtgaacccaaaagcgaaaatactttgcgtattatttacaccggtccaccgctggcagcagatcgtgagtctctgttctggatgaatgttaagacgatccctagcgtagataaaaatgcattgaacggcaggaatgttttgcaactggcgattttaagccgcatgaaattatttctccgtccaattcaattacaagaattacccgcagaagcgccggacacactcaagtttagccgatccggtaactatatcaatgttcataatccaagtcctttttatgtcaccctggttaacttacaagtgggcagccaaaagttggggaatgctatggctgcacccagagttaatagtcaaattcccttacccagtggagtgcagggaaagctgaaatttcagaccgttaatgattatggtagtgtaactccggtcagagaagtgaacttaaactaaccgaatcatctgacaatatcagagctaattatgaaaatacccactactacggatattccgcagaggtatacctggtgtctggccggaatttgttatagttctcttgccattttaccctcctttttaagctatgcggaaagttatttcaacccggcatttttattagagaatggcacatccgttgctgatttaagccgctttgagagaggtaatcatcaacctgcgggcgtgtatcgggtggatctctggcgtaatgatgagttcattggtagccaggatatcgtatttgaaagcacaacagaaaatacaggtgataaaagtggtgggttaatgccctgttttaaccaggtacttcttgaacgaattggccttaatagcagtgcatttcccgagttagcccagcagcaaaacaataaatgcatcaatttactgaaagctgtacctgatgccacaattaactttgattttgcagcgatgcgcctgaacatcactattcctcagatagcgttgttgagtagcgctcacggttacattccgcctgaagagtgggatgaaggtattcctgctttactcctgaattataatttcaccggtaacagaggtaatggtaacgatagctatttttttagtgagctcagcgggattaatattggcccgtggcgtttacgcaacaatggttcctggaactattttcgcggaaatggatatcatagtgaacagtggaataatattggcacctgggtacagcgcgccattattccgctgaaaagtgaactggtaatgggagacggcaatacaggaagtgatattttcgatggcgttggatttcgtggtgtacggctttattcttctgataatatgtatcctgatagccagcaagggtttgccccaacggtacgtgggattgcccgtacggcggcccagctaacgattcggcaaaatggttttattatctatcaaagctatgtttcccccggcgcttttgaaattacagatttgcacccgacatctagtaatggcgatctggacgtcaccatcgacgagcgcgatggcaatcagcagaattacacaattccgtatagtacagtgccaattttacaacgcgaagggcgtttcaaatttgacctgacggcgggcgattttcgtagcggtaatagtcagcaaagtagccctttcttttttcagggtacggcactcggcggtttaccacaggaatttactgcctacggcgggacgcaattatctgccaattacaccgcctttttattagggctggggcgcaatctcgggaactggggcgcagtgagcctggatgtaacgcatgcgcgcagtcagttagccgacgccagtcgtcatgagggggattctattcgcttcctctatgcgaaaagcatgaacaccttcggcaccaattttcagttaatgggttaccgctatagcacacaaggtttttatacccttgatgatgttgcgtatcgtcgaatggaggggtacgaatatgattacgacggtgagcatcgcgatgaaccgataatcgtgaattaccacaatttacgctttagccgtaaagaccgtttgcagttaaatgttagtcaaagtcttaatgactttggcagcctttatatttctggtacccatcaaaaatactggaatactagcgatagtgatacgtggtatcaggtggggtataccagcagctgggttggcatcagttatagcctcagttttagctggaatgaatctgtagggatccccgataacgaacgtattgtcggacttaatgttagtgtgcctttcaatgttttgaccaaacgtcgctacacccgggaaaatgcgctcgaccgcgcttatgcctcctttaacgccaaccgtaacagcaacgggcaaaatagctggctggcaggtgtaggtgggaccttactggaaggccacaacctgagttatcacgtaagccagggtgataccagcaataatgggtacacgggcagcgccacggcaaactggcaggccgcttacggtacgctggggggcgggtataactacgaccgcgatcaacatgacgttaactggcagctgtctggcggtgtggtcgggcatgaaaatggcataacgctgagccagcctttaggggataccaatgttttgattaaagcgcctggcgcaggcggtgtacgcattgaaaatcaaactggcattttaaccgactggcgcggctatgcggtgatgctgtatgccacggtttatcggtataaccgtatcgcgcttgataccaatacgatggggaattccatcgatgttgaaaaaaatattagcagcgttgtgccgacgcaaggcgcgttggttcgtgccaattttgatacccgcataggcgtgcgggcgctcattaccgttacccagggcggaaaaccggtgccgtttggaagtctggtacgggaaaacagtaccggaataaccagtatggtgggtgatgacgggcaagtttatttaagtggtgcgccattgtctggtgaattactggttcagtggggagacggcgcgaacagtcgctgcattgcgcactatgtattgccgaagcaaagcttacagcaagccgtcactgttattagcgcagtttgcacacatcctggcagttaaaggaaattatcaataagataatctgcagattattattggcgatggcatgtttgtgtctggcaaacatatcctgggctactgtttgtgcaaatagtactggcgtagcagaagatgaacactatgatctcagtaatatctttaatagcaccaataaccagccagggcagattgttgttttaccggaaaaatccggctgggtaggtgtcagtgcaatttgtccacccggtacgctggtgaattatacataccgtagttatgtcaccaactttattgttcaggaaactatcgataattataaatatatgcaattacatgattatctattaggtgcgatgagtctggttgatagtgtgatggatattcagttccccccgcaaaattatattcggatgggaacagatcctaacgttagccaaaaccttccattcggggtgatggattctcgtttaatatttcgtttaaaggttattcgtccctttattaacatggtggagatccccagacaggtgatgtttaccgtgtatgtgacaagtacgccttacgatccgttggttacacctgtttataccattagttttggtggccgggttgaagtaccgcaaaactgcgaattaaatgccgggcagattgttgaatttgattttggtgatatcggcgcaagcttatttagtgcggcagggccgggtaatcgacctgctggtgtcatgccgcaaaccaagagcattgcggtcaaatgtacgaatgttgctgcgcaggcttatttaacaatgcgtctggaagccagtgccgtttctggtcaggcgatggtgagcgacaatcaggatttaggttttattgtcgccgatcagaacgatacgccgatcacgcctaacgatctcaatagcgttattcctttccgtctggatgcagctgcggcagccaatgtcacacttcgcgcctggcctatcagtattaccggtcaaaaaccgaccgaagggccgtttagcgcgctggggtatttacgcgtcgattatcaatgaggtacggagaatgagaagagtactctttagctgtttctgcgggctactgtggagttccagtggatgggcagttgaccctttaggaacgattaatatcaatttgcacggtaacgttgttgatttctcctgtaccgtaaacacagcggatattgataagacggtagatttaggcagatggcctacgatacaactactgaacgctggcgataccacggcactcgtcccttttagcctgcggctggagggatgtcctccgggtagtgttgcgattttatttacgggaacgccggcatccgataccaacctgctggctctggatgatcccgcaatggcacaaaccgtcgccatcgaattacgtaatagcgatcgctcccggctcgcactgggggaggcgagcccgactgaggaagtagatgcaaatggcaatgtcacactaaacttttttgccaattatcgagcgttagccagcggtgttcggccaggtgtggcgaaagcggatgcgatatttatgatcaattataattaatattatattaattcgtataatttggcgtagtcgataagctctacaatactatgcaaacctagcttgccataaatattagatttatgcgcactaactgttttattgctaagtaataacttatcggcaatttctttattagataatccgctaaccagataacgtaatatggtcacttcacgattagatagcacagtgaccgtactactattcgtactacatttattgctttttatatagttaagcgtttcgctgggaaaaaacgtgtatccggagaggatcatctgaacggcatgaaaaatatcattctgatcattgcatttactgacaaaaccgttagcaccagcttgtatcgctctgccagcataaaagcattcacttttgctacttaaaaataacactttcactgtgctctggatttgtttgatccttttcaggaaggtaaaaccgtctgttccgggcaagtctatatccataatgattaaatcaacaggacgggttcggagataatcgatggttatgcgataatcatccgttttcaggacaatctgcaattcactgtttttttgcaacagaacttcaatagacattctgatgataggatgagtatccataatgatcacgctcgttggtttcatagttaccagtctcataggagcggacaattttccgttaggtcgggaaattgtactttgatacatgaaaatacgggttttcttgattcagacgcgcagcggtgtgcgtttgtttgccgctatagcgaaataaatcagaaaatcagacgcggtcgttcacttgttcagcaaccagatcaaaagccattgactcagcaagggttgaccgtataattcacgcgattacaccgcattgcggtatcaacgcgcccttagctcagttggatagagcaacgaccttctaagtcgtgggccgcaggttcgaatcctgcagggcgcgccattacaattcaatcagttacgccttctttatatcctccataatttcagagtgggacatatttgggacattatcaccaaaaatgtcgtctattttcctcgcatgctctgtcaaatgattaggcgcaaggtgagcatacctacgaaccatttctatggactcccatccgcccatttcctgaagcactgataatgggacgcctgactgaatcagccagcttgcccaggtgtgtctgaggtcatggaaacggaaatcttcctcatttatgcccgtcttatccgtttccgctttgcccttcaccacatcactttttgtcgctgtttggcgagataattcaacggtgtcaggccgtaaaacgccttaaaaacagagataaagtagctcgtgctgctatagccacataattgcgccacctgagtgatatttttgttatccatcaataacatctgtacggcgtaacgcatacgacactctgtgacaatctggctatagctggtattttcgttttttaatttctttttgagcaggctggggcttaaacataggctactggcgacaattcgcagattccagtaatgctgaatatcgctttgaataatgcggcagacgctgtcgcggacgctgctgcgtaagatatacatcagtagggcaataaaccggctttgctcaagaaagttagacaatacggtaaaaagcaatgcgcgcgtcaactccgcttcgcagggtctgctgggttgctgcttgctgtggttggcggctagccggaacacttccggtgtacggctatgacaagcgataaccggggttgccagccggctccagggctttacacaggttaagttcttatttaaaaacaacagataatcgttgatgatgttacggttgatgtgggtgattaatacgtgatttaacgtactgagttcaatgacgttattgttgcacgcgaaggcggccaggtagtttttcggaagggtaaacgtagcatggttattgacgcttacctctacctctttttcggtcaggatcaccacgcaaggttcactgctgctcaattgcatttcgcactcctcagatatcagaaactccgctcaaaggatctatgcttcctgcatgagtgatcggcccgttcgccgataacgatcttctttctttagcacgctttttagcaattaatcttgatggaattctgatgagagcgaaagaggtaagccaggtcgtacccgacttacctggaggagatttaatactcgagaatgccgtgcgcgacgggcaaatagcgcagagagaaatagagagtgtctttaccgcaagaggaacgtttcgctaacaggctggcaatttctgcgtccggtttcggtttcgctgtaaaggttttgcctttgccggcgacaaaaagttcataaacaacgccgctggcaggggcgggactttggcaatcggcgctggcctgtaaataacgttcacgctgttcagcggtcagtttatccacgccgctgccatcctgtacccagacattaacgccggttgctttaacgtgttccagcagttggcgatagccatcggggctcatgtttccggcgaaaaaactactgatataaaccggttttgcactaacatcgctaatcagccgctgcgcgttgtttaaccatgttagcaaaggctgacgggcggcttcgctgcgccagttcaggtcgtcaatttccgcgctgatgtaccagccatccggcgttatgccaggcgcggcgctccataatctggcttgctggagatcggcagccagcaggcgattaagatagctttccagcgctgcggagctctgtttctggtgcataaaaaattccggatcggcgttcagcccgacaataagcttcagaccagcctgttgcgcagctgcggcccgcttaaacaataacgtgcgctgttctggctgggtaaatgcatcgccgtaacgggtccattgcaaaacaagggtatcgaagccttgcaaacgtaactgactcatcagcccctgccactgggtatcggtaacctgactatctcggttttgtggttgccagataatacctttcatcgcaaaggaaaaagggctgaccaaaagcagtgtcagcaatacgaaaatgaacttacgcatttaccagtgcactccaatggtgagaaacgcgttgttgcgctctccgttacgttgattaatcgccttaaaggtatgttgatactcgacgccgagactgactttgtgcggccaggcgtcgtagtgcgtctcgccggtccagatattccagcggaccccgactccgccaagctgcgcgccctgagtgcctttatcacgatagccgttgtcctgaacgtgagcgtaaggctcaatagtctgtccgttagctaccttctgatgccagctgacgcgataatctgccgtccacgcctgaatatcctggcggatatattgcgccgcatcgaggtacaggttttgggcaaaccagccactaccgttcgggtgccattcgtcgctgtatttgccgccattaaagaaactggcgctggcgcgcagcatggtatcggatgcgccattttggccgttcagcggcaactgctgttcgacggcgatgaaaaagatctgatcgcgcagcggcttccagcgcagaccggtgccggacatcggatttttcaccggcatcatcaccccgttttctccggtatcggcaaagacgcggctataaacactgagcaggtcgccttccagcagcatattgcgtccgatgcggtactcggcttccagttgtccgtagctacgatagcttttccctggcgctgcgccgccgacattattgttagcggtactcattgcgccggaacgcaagccgatggaagaatcgaaactgaacgtccagcggcgaccgacctcctcatgcaaacggcggaaattgaagcgttgttgattttgttctggggtcagtggggttatcagcgcctgattatcaatgtcatcaatcaccagccgggcgtagtgctgcgtcgcaggcatgtcatccagacgctggttcacgtaggccagttgtcggatcagtgccggatcgtccggaagccctttatgcgccggttcgagcatttcccggctctgtgcgatatcaccgctatcccacaaggcgtaaccaagcgctgcctgggtgttgctattattcggttccagttccagcgcggcgcgcaaatcactcaccgcggccgggacattatgacgttggcgataaattgtcgcccgcgcaacgtaagcgttggcagaaggcgcaatattgatactgcgcgtgagatcgttcagtgcgagttccggctgaccaggaatgtaacgttgcgcatgcagccaccagtagagggcattgcttcccagtccacgtttttctgcctgttgtagccagcgatcgcgagccgcaccatttcctgccgcctgggcggtattggcagcagcaagcagatcctcattgctcatgtcgtgaagactgattttctgccaggccgccagtgcggtggcgtagtcctcaacctgatacgcctgataggctaccgcacgatgttgccaggcgctcggttgtcgttgttcggcctgaagccatgcatacaacgccacaccgggtagcgtgtcccgataacactttgccagacggttccaggcggcggcatcgtaggaagggctcatatcgcccagcaagcgaactattgccgggcaattatctgcaatacccggcaactgactttgccactgacgttgctccgccagcggtaagggtttgcttaaaatcgccaccttcgccggcgttgccaggtaaggatgactttccagcagagacgccagtcgcgccattaaagtctggctgacacgcgcatcgccctggaaaggatagcgttgcagcaataaatcggcagcttcgcgactctgctcgttctgcatcagttgccaggttagttgatccaggcgggtaagatttgccggttcttgctgatacagcaatcgtgccagacgcagagcttcagccttgttacgggtcgccacgctgacagcataacgctcctcaagcatttcattggcggggagggtggcgagcagtttttgcgctgcgtcgtactgaccttcttttaacagcaccggtagcgtcgcgccaacaacatactggcggttgtcggcaaactgtaccgtataattcgccaacgcctgaacggggttagcgctgtatttagataacagatagagccaacttttctcttgtgcgtccgtggtaaatagtggcttattttcaatgagataatgctggaggcgtgctttttcgccacgataagccagcgcggtcgcgtaagtaatataactctgaggatcggtgaagatcccctgactttgcagtgccaggatccgatcgtccagctgcccggcaagaagcacgtcaaaccactgacggcgttctgccgcgcttaatgtgttctgctggcgtgcttcattgtatagcgtatctgcctgggaccattgtttcaggtagattgcccgttgcagcagatcggttcgcagcgtttttccttccgggcttgcagcaaacgtcgcatcgttcagttgcgctctggcgacaggtaactgtgccagccgcagggcattctgcccgacttcactgcgacaacgcagggtcggcgcagcatcgcacgctttttgctgggcaagcagttcttcaactgtcgtaacgcttttcacttcaaccggaatagccgccagactgcgctcaagtcgggcatctcctgggtgacgtttcagttgatcctcaagcaacagccgcgcccggtcatcatgaccaaaatggcgataggcttccgcaaggtataaagtcagcggaatattatccggcacctgctggtgtatatattcaaattcgcggatggcggttgcttcgtcgttatttttctgtgccttcagcgctttatcgagacggggataaataacaaaatggcgataatcgctcagccccagctcttctgcgctggtgccgatattgtctgcgagtgcgctggtactcaataaagacgtcagcagtaaaccagaccatccgatgacgcgattaaggttattctccttcattttcggactccagttgcgcaacctgttctgtgtttaaacctgctttgagtaatagactttgcatgctaacttgtaattcgcgttgaattgtcaggacgcgatccaacgtttcctggctgataacgccttcggtgaccaaaaacttgccgagcggcagagaactgcgttcatggcgcaataacaacacgttaattgcactacgattaatatgaccgagcgtggtcagtatttcggcgaacaggaactgatgcggcacatattgccgccagatttcaccggcctgctgttccgtgagccactgatgctgaaccgcattgtacaacattgcccgcggatcgtgaccgcgtcggcgtgcataccagtgacgtaaccctgtgacaatttgtccccgcagaacaatgacgtaacgcactttgcgtccgactttacgcgtcagggccgccaggctaaccgggtcaataccatcttcactgccgacaattaactcgtcattttccagacgcagcggcagtaccgcataatgcagcgccacggaggccggcatttcggcaatcaggctggaagggatctgccaggcatcgatggattcccacgccacgccgttttgctctgccagcgcctgtgccagctgctcggcgctaatcagcccctgcatcagcatactaccgcccaggcgtagaccttcgacgcgattacgcagtgctgtatcgagttgttcttcagtgatgacctgattttccagcagaatttgacctaacgggcgcaagctgcgggtatcgccagtcacgctggggaagtcatgcgttgttttatcccacgccacgcgacgtggatcgccgtgttgaagtacctgttttagcgcgcgccagttggccatgaagttaatcaggttgccccagaaaagacgcaggacggaaagcagcccctgcgtcaggccgtagtagccagtaacgaaaatcacccgctgcacgatgcggttaaccatcaaaccaaagtttagccacagcagggtcattaaccatgcgctgccgctgaaaatagaaaggaaatgccaggcatcgggccacaaactttcatacgccagcaacagcaaaagctggatcatcaccagcatcgcgaggaagctgacaaagttactgattgcccctttgcggtcgcgccagagaaagtagttcagcgtcaggctggaggtccatttatgggttttaaagccttggaaaacaatgccgatgatccagcgggatttttgtcgaaccgcagtgctaaaggtatcggggaaatattcgcgcacgcagatcatgttacttgtccgcgcgtgctgtaaaaatttacgctgctcgcgttctttggcttcgtccaccaccggaaaacggacaaaaatttccgtcatacctttttctttcaggcggaagccaatgtcgtaatcttcagtaagactctgcacgtcgaaagcaataccgtcaccgtcagctaacagtgcggtcacggcgcggcggctgaaacaggtgccgacgcctgcgctgggcacttgtccggcgagggcttcacgcaccggaacatctttgccatgcagctcactaaactcatcaatgtaagtcatgctggtgaagtgcgtccattcgcgttcgaacggatacaccgggatctgaatcagatctttacgctcgaccagatagttgaacagacgcaattccatcggactaatcacatcttcggcgtcatgcagaataaaaccagcaaaagcgaaattggcgctacgctcaaattgggtgatggcgtccagcacgttgttcagacagtcggctttgctggtggggccaggacgcgcgcagactaccttatgcacattcgggaagcgagcgcacacttcgtcaacatcacgctgagtatcggggtcgttggggtaggtgccaacaaagatatgatagttttcgtagtcgagcgtggtcgccgccagctcggccatattgccgatgacgcccgtttcattccacgccggaaccataatcgctaacggtttttcatctggtttatacagttcgcggtaactcattcgcgggtagcggcgataaacactcaacttgcgtttaatgcggcgtacccagtagacgacatcaataaaaaaatcgtccagcccgctgatgaacatgatgaccgctaacgttatcgcgattacttttaagccgtagagccaggtagcaaaaacatcaagaagccagtccacacaaaaaccttacattaacgctggttatgtttagggtggcgtatattaaggttttttatgaattgtgacagctttttaccattaataggtatgactattgcggcacgttatttttacactggttataaaagttgccgtttgctgaaggattaagcgggtaatgtgataacaaaccttgtcccccgcgcatcgctcgttaccgcaaccgtgcctttatgcgcgacaacaatgcttttcactatcgccaggccaataccgctaccttcaccttttcgctggcgggaggggtcaacgcgatagaaacggtcaaacaatcgcggtaagtgctcgggcgcaatgggcgtaccggggttttcgacgataacttgcaccaggtgatcgaccgtctgacagcgcactacaattgtctctccggttggcgtataacgcagggcgttgctaagcaggttgcttagcgcccgacgcagcatcagcggatcgcccgcgacctgacacttgtcgccaacaaaccgcaactccacgccgcgatcttccgctaacgcctcgaaaaaatcgaacactttgccgacttcatccgccaggttgagcattttcttttcggggattagctggttgttatcggcctgagcgagaaacagcatatcgctgaccattttcgccattcgcgtcagctcttcgagattagagtagagcacatcttccagctccttctggctgcggctctggctgagggcgatttcggtttgcgttatgagattcgtaattggtgtgcgaatttcgtgagcgatatccgcactgaaattggactggcgggtaaagacatcctcaatacgctcgatcatatggttgaagctcagtaccagctgttccagctcaatgggcacggtctgcgggtcgaggcgaacgtcgagatctttgctggtaatattctggatttgacggctgacgctgcggatcggcgcgtgacctttatgtaccgccaacagtacgataaagacgatcaggatgctgattacgcttgcggtcataataagtttattcatcaaatcatttatgtaatgaagatgaaaatcgatgctaagcgcgatgtagagcgtataaatcggtttgccgtccaccaacgggccaaccggcaagttaatcatccgccagttgctgtgttccatatgcccgtgaccgtggcctggcatcatcatcgtcgggccggaaaggagatacacctcgccaccctgagcgtctttatcgggtatggcgtcacgcgtaaactcgcggatatccggcgcaccgggggagtgatacaccgttttaccctgactatctgccagggaaatcaacacattggaataaccactgacgatatcttccagcgtcattaagcgtcgggcttgcgtttcgtcagggtgatttagtacccgttcaagggtggcgctaatctcttttaaatcattaatatcctgctcggcaaaatgaacttttacactgtggatcatgatccatgcaaaggcgaaaaacgccgcgatggtggccaggctgataaaaaaggtcaggcgggttgccaggctaaacgggcgctgaaatggcttactgaccatccggcacctcaagcatgtaacccacgccgcgcacggtctgaattagcttcggctcaaagtcgttgtcgattttgccgcgcagccgcttcaccgccacatcaatagcattggtatcgctgtcaaaattcatgtcccatacctggctggcgataaggctgcggggcagcacttcgccctgatggcgaaggaagaactccagcagagtaaactctttactggtcaaagtgatgcgcgtgccgctgcgggtgactttgcggctgacgagatcgaccatcaaatcggcaacctgaaactgactttcgataatcaccgccgccccgcgccgcagtaatgtgcgcacccgcgccagcagttcagcaaaagcgaatggcttcaccaggtagtcatctgcccccaactccagccccttgacgcgatgttcaatggtgccaagcgcggtaagcaacagaatcggcatccctttattggcggagcgtaacatgcgcacgatatcccagccgttcacgtccggcagcataatatcgaggattatcagatcataatcaccggtcatcgccagatggtagccattcagcccgttgtcggccaaatcgaccacaaaaccggcttcggttaaccctttggtcaagtattctccggttttcttttcatcttcgacaatcaacagtttcatatttcctccgcatgttgcccgggcaattctagagtagcgggatcagatggcaatcgcttattggcaaaatgacaattttgtcatttttctgtcaccggaaaatcagagcctggcgagtaaagttggcggcataaaatcaccagaaattatgagcctatgtctccttgtaaacttctgccattttgtgtggcccttgcgctaaccggttgtagtctggcaccggattatcagcgtccggcaatgcccgtgccgcagcagttcagtctcagccagaacggcctggttaacgcagcagataactatcagaacgcgggctggcgcaccttttttgttgataatcaggtgaagacgctgattagcgaggcgctggtgaataatcgggatttgcgcatggcgacgctgaaagtgcaggaggcacgggcgcaatatcgtctgaccgatgccgaccgctacccacagctcaatggcgagggcagcggcagctggagcggtaatcttaaagggaataccgccacgacacgggagtttagcaccggccttaacgccagctttgacctcgattttttcggtcgcttaaagaacatgagcgaagccgagcgacaaaattatttagccactgaggaagctcagcgcgcggtgcatattctgctggtttctaatgtcgcgcaaagctatttcaatcagcaactggcgtatgcgcaattgcaaatagccgaagaaacgctgcgtaattatcagcagagttatgcgtttgtcgaaaaacaactgttgacaggtagcagtaatgttctggcgctggaacaggctcgcggggtgatagaaagtacccgcagcgacatcgctaaacgtcagggggaactggcgcaggcgaataatgcattgcaactgttgctgggaagctacggcaagctgccgcaagcgcagacagtaaacagcgacagcctgcaaagcgttaaattaccggcgggattgagcagccaaatcttattgcagcgcccggatattatggaagctgaacacgcgttaatggcggctaatgccaatattggcgctgcacgcgcggcattttttccgtctataagcctgaccagcggaataagcaccgccagtagcgatctaagcagtttatttaacgccagcagcgggatgtggaattttatacccaaaattgagatccccatttttaatgccggacgcaaccaggccaatctggatatcgccgaaattcgccagcagcagagcgtggtgaattatgaacagaaaatccagaacgcctttaaagaagtggcagatgcgctggcattacgtcaaagcctgaacgatcaaattagcgcccagcagcgttatctggcaagcctgcaaattactttgcaacgggcgcgggcattatatcagcacggcgcagtaagttatctggaagtgctggatgccgagcgttctttatttgcaacccgacaaactttacttgatctgaattatgcccgtcaggttaacgaaatttctttgtataccgcacttggtggcggttgacagcaatatactcgtcatacttcaagttgcatgtgctgcgtctgcgttcgctcaccccagtcacttacttatgtaagctcctggggattcactcgcttgtcgccttcctgcaactcgaattatttagagtatgacttttaactccaggagagaataaatgaaaaaagcactgcaagtcgcaatgttcagtctgtttaccgttattggctttaatgcccaggctaacgaacatcatcatgaaaccatgagcgaagcacaaccacaggttattagcgccactggcgtggtaaagggtatcgatctggaaagcaaaaaaatcaccatccatcacgatccgattgctgccgtgaactggccggagatgaccatgcgctttaccatcaccccgcagacgaaaatgagtgaaattaaaaccggcgacaaagtggcgtttaattttgtccagcagggcaacctttctttattacaggatattaaagtcagccagtaacccaggtttaatgagatgaaaaaaatcgcgcttattatcggcagcatgatcgcgggcggtattatttctgcggcaggttttacctgggttgcaaaggcggaaccgcctgcagaaaaaacgagcaccgcagaacgtaaaatcttattctggtacgacccaatgtatcccaatacgcggttcgataaaccaggtaaaagcccgtttatggatatggatctggtgccgaaatatgccgatgaagagagttctgcgtctggtgtgcgcattgacccgactcagacgcagaatctgggggtgaaaacggctaccgtcacgcgcggaccgctgacttttgcccagagtttcccggcgaatgtcagttacaacgagtatcagtatgccattgtgcaggctcgcgctgccgggtttatcgacaaggtgtatccgcttaccgtgggcgataaagtacaaaagggcacaccgcttctcgacctgaccattcctgactgggtggaagcgcagagtgagtatttactgctgcgcgaaaccggcggtacggcgacccagactgaaggcattcttgagcggctgcgactggcgggaatgccggaggcggatattcgccgcctgatcgccacgcaaaaaatccagactcgctttacgctcaaagcgcccattgatggcgtgatcaccgcgtttgatctgcgcgcgggaatgaatatcgccaaagataacgtggtagcgaaaattcagggtatggacccggtgtgggtcactgctgcgatcccggagtctatcgcctggctggtgaaagatgccagccagtttaccctcaccgttccggcgcgaccggataaaacactcaccatccgcaaatggacgctgctacctggcgtggatgccgcgacccgcacgctgcagctgcgtctggaagtcgacaacgccgacgaggcgctaaaaccgggcatgaacgcctggttgcaactcaacaccgccagcgaaccgatgctgctcattccgagtcaagcgctgattgataccggcagcgaacagcgggtgattaccgttgatgccgacgggcgctttgtaccgaaacgcgttgctgttttccaggcaagccaaggcgtcaccgcattacgctctggtctggcggaaggtgaaaaggtggtttccagcggcctgttcctgattgattccgaagccaatatttctggcgcactggagcggatgcgctctgaaagtgcgacccatgcgcattgagggaataaccaatgattgaatggattattcgtcgcagcgtggcgaaccgttttttggtgctgatgggcgcgttgtttctgagcatctggggcacctggaccatcattaatacgccagtggatgcgctgccggatctctccgatgtgcaggttattattaaaaccagctatcccggtcaggcaccacaaatcgttgaaaatcaggtgacttatccgctaaccaccaccatgttgagcgtgcctggcgcgaagactgtgcgcggtttcagtcagtttggcgactcttatgtgtatgtcattttcgaagatggcaccgatccgtactgggcgcgtagccgggtgctggagtacctcaaccaggtacagggtaagctgcctgcgggagtcagcgccgagctggggccagatgccacgggtgttggctggatctatgaatatgcactggtggatcgcagcggtaagcacgatctggccgatttacgcagtttacaggactggtttctcaaatatgagctgaaaaccatccctgacgttgcggaagtggcgagcgtgggcggtgtggtgaaagagtatcaggtggttatcgatccccagcgcctggcgcagtatggcatcagtctcgccgaagtaaaaagcgcgctggatgctagtaaccaggaagcgggcggtagcagcatcgaactggcggaagcggaatatatggtgcgcgccagcggctatctgcaaacgctcgacgactttaatcacatcgttttaaaagccagtgaaaatggcgtgcccgtttatctgcgcgatgttgcgaaggtccagattggcccggagatgcgccggggcattgccgaactaaacggcgaaggcgaagtggcgggcggggtggtgatcctgcgatccggcaaaaacgcccgagaagtgatcgccgccgtgaaggacaaactggaaacgctgaaaagtagtctgccggaaggcgtggagatagttacaacatacgatcgcagccagctcattgaccgcgccatcgacaacctcagcggcaagttgctggaagagtttattgtggtggcggtagtctgtgcgctgtttctctggcatgtgcgcagcgcgctggtggcgattattagcttgccgctggggttgtgtattgcttttattgtcatgcacttccagggactgaatgccaatattatgagcttgggtggcattgcgattgccgtcggggcgatggtcgatgctgctatcgtcatgatcgagaatgcgcataaacggctggaagagtggcagcaccagcatcctgacgccacgctggataataaaacgcgctggcaggtgatcaccgatgcgtctgttgaagtggggccggcgctatttatcagtctgctgattatcacgttgagctttatcccgatcttcaccctggaagggcaggaagggcgtctgtttggcccgttggcgttcaccaaaacgtatgcgatggcgggtgcggcgctgctggcgatcgtagtgatcccgatcctgatgggctactggatccgtggcaaaattccgccggaaagcagtaacccgctcaatcgctttttgattcgtgtttatcatccgctgttgctgaaagtactgcactggccgaaaaccacgctgctggtggcggcgcttagcgtgctgacggttctctggccgctcaataaagttggcggggaatttttaccgcagatcaatgaaggcgacttgttgtatatgccaagcacgctgccggggatttccgcagcagaggcggcgagtatgctgcaaaaaaccgacaagctaattatgagcgtacctgaagtggcgcgggtatttggcaaaaccgggaaagcggaaaccgccaccgattctgctccgctggagatggtagaaacgaccatccagcttaagccgcaggagcagtggcggccaggcatgacgatggacaaaatcattgaggaactggataacaccgtgcggctgccggggctggcgaatctgtgggtgccgccaattcgtaaccgtatcgatatgctcagtaccggcattaaaagccccatcggcattaaagtttccggcactgtgctggcggatatcgacgcgatggctgagcaaattgaagaagtagcgcgaacggtgccaggcgtagcttctgcgcttgccgagcggctggaaggtgggcgctatatcaacgttgagattaaccgtgaaaaagccgcacgttacggtatgacggtggcggatgtgcagttgtttgtgacttctgcggtgggcggggcgatggttggcgaaacggtggaagggattgcccgttatccaattaatctgcgttatccgcaaagctggcgcgatagtccgcaggcactgcgccagctgccgatcctgacgccgatgaagcagcaaatcaccctggcagacgtggccgacattaaagtctctaccggaccgagcatgctgaaaaccgagaatgcgcgcccgacgagctggatttatatcgatgcccgcgatcgtgacatggtgagcgtggttcacgatttgcaaaaagcgatagctgaaaaagtgcagttaaaaccgggcaccagcgtggcattctccgggcagttcgagctactggagcgcgccaaccataagcttaaactcatggtgccgatgacgttgatgattatcttcgtgctgttgtatctggcgttccgtcgggtgggcgaagcgttgctgattatcagcagcgtaccgtttgcgctggtgggcggcatctggttgctgtggtggatgggctttcatctttccgtggcgacgggcactggctttatcgccctcgccggggtcgccgccgaatttggcgtggtgatgctgatgtatttacgtcacgccatagaggccgtgccgagcttgaataatccacaaacattcagcgagcagaagctggatgaggcgttatatcacggcgcggtcctgcgcgtgcgcccgaaagcgatgacggtggcggtgattatcgccggtctgctgccgattctgtggggaacgggggctggtagtgaggtgatgagccggattgccgcgccgatgattggcggcatgatcaccgcacctttgctgagcctgtttattatcccggcggcgtataagctgatgtggctgcaccgacatcgggtacggaaataaaagcaggataccccgtttaaccgtgtggattgtgtcttgcgacgatgggcactaaatgttaaaaggtgcccctcaacaaaaaagacacacaggggaaaggcgtgaaaaacgcgagtaccgtaagcgaagatactgcgagcaatcaagagccgacgcttcatcgcggattacataaccgtcatattcaactgattgcgttgggtggcgcaattggtactggtctgtttcttggcattggcccggcgattcagatggcgggtccggctgtattgctgggctacggcgtcgccgggatcatcgctttcctgattatgcgccagcttggcgaaatggtggttgaggagccggtatccggtagttttgcccactttgcctataaatactggggaccgtttgcgggcttcctctctggctggaactactgggtaatgttcgtgctggtgggaatggcagagctgaccgctgcgggcatctatatgcagtactggttcccggatgttccaacgtggatttgggctgccgccttctttattatcatcaacgccgttaacctggtgaacgtgcgcttatatggcgaaaccgagttctggtttgcgttgattaaagtgctggcaatcatcggtatgatcggctttggcctgtggctgctgttttctggtcacggcggcgagaaagccagtatcgacaacctctggcgctacggtggtttcttcgccaccggctggaatgggctgattttgagcctggcggtaattatgttctccttcggcggtctggagctgattgggattactgccgctgaagcgcgcgatccggaaaaaagcattccaaaagcggtaaatcaggtggtgtatcgcatcctgctgttttacatcggtagtctggtggttttactggcgctctatccgtgggtggaagtgaaatccaacagtagcccgtttgtgatgattttccataatctcgacagcaacgtggtagcttctgcgctgaacttcgtcattctggtagcaagcctgagtgtgtataacagcggggtttactctaacagccgcatgctgtttggcctttctgtgcagggtaatgcgccgaagtttttgactcgcgtcagccgtcgcggtgtgccgattaacagcctgatgctttccggagcgatcactagcctggtggtgttaatcaactatctgctgccgcaaaaagcgtttggtctgctgatggcgctggtggtagcaacgctgctgttgaactggattatgatctgtctggcgcatctgcgttttcgtgcagcgatgcgacgtcaggggcgtgaaacacagtttaaggcgctgctctatccgttcggcaactatctctgcattgccttcctcggcatgattttgctgctgatgtgcacgatggatgatatgcgcttgagtgcgatcctgctgccggtgtggattgtattcctgtttatggcatttaaaacgctgcgtcggaaataaggcattcacgctacatccgacaaaacgatgtcaaccatccgaaaccgctctcatccattcgatgagagcggtttttttaattactgcttaaatgcacccgccagagagcgaatatcattgccggttggcgagtaatccccgcatatccggttgtcaggtcaggatggtaaggcacctgctttacactttcgcccgtggtcagtgatggctgcgggcgaatcgtaccagatgttgtcaattaatcgtgttggcacagcgttatgactatcttttcttttatctgccagtgcacagcaaacatctcattctcacgatgaatgatgacctgctgtttattccagctaattatctgatagtccagaaaacctgcatcagtttggatctcacttgccttaaatgcgctctctttggcggaaaatgccagtgtcagcgccagagaaaaggctaaaccgcagtctgcgagtcgctcgtgttccgctggtgtaataatgttgtctgtcaattctcttgcggtttgtacagaaaaaatttcttctatatcaatgccaatcggttgacgagataccacggctaatgccgtagtcccacagtggctaatactgccgtatacctccgcaggccagacaggttggcgtagctcgccgattgcgggcacacatttatagccatattcccgcaaagcataaacagcagcgatccgtccggctaaatgctctgttttacgtttacgtccagcgtgttgcagttgtgcgtagtgcggcagccagagtaaatcctgctcacaaaaattcgccggatcgaactcaacaaaatgcagcgtatgtccggcaaaggggagggaggtatgcgtagttttcatatcgaccatattcgagactgatgacaaacgcaaaactgcctgatgcgctacgcttatcaggcctacatggtcctgcaatatattgaattggcaagatttttgtaggccggataaggcgttcacgccgcatccggcatgaacgacgcgcactttgtcaacaatctgacgttagcatcagaagtgggtgtttacgctcatataccacgtacgtcccggctcgttataggtatacgccccggcaccggcgatatagttggcccctgccgaatcgcccgtggtctgggcattacccgcacgccacaaacgtttgtcgaacagattgtccacgccgccggtcagactgacattcttcgtcacatcccaggtcgcgctcaggccaacaatgctgtaaggactaatttctttggtttccggtccaaccgctggctgacctttatagttgtacttcttcggctgctgcttgccgtaccaggtgaaggtcgtttgcatgctcaaatcttcccgtgcctgccagctcagcgtactgttcaacgtatactccgggatgatgctcaaacggtcgcccgtggttttgttttcactcttcagcatataagtgatgttattggtccacatcaccgtttcgctaaccggtacgtttaagcttccttccagaccttcaaccaccgctttcggcacgttatcccactgatagagatcggtgccgactgcgttttgccctacagccacatagcccgcttcaatcttattgcgataatcgttacggaaccaggtgacgcccgccagccacccgtcgcgtttgaactccagaccaatctctttgttgatgctggtttctgctttcaggtcatcgttaccttgcagatagcagccgcccgcgctggcatagcaaccctgacctttactgtagagaatgtagttcgggttagtctggtacaggctcggcgctttataagcacgggcgatgcccattttcagcgtgaagtcatcgcctaaaccttggcttatgttcagcgccgggctccagttattgccgacaatactgtgatgatcgaaacgcagccccggcgttacgatggtgctgtcagtcagctccatgttgttttcggcaaacaggctgaaaatttctgctttactatacgggctacggtcggtggtactcacgccatcaatagcgccaccggtattcgttccggtcagtgcctgggtgttggaacttaagtccttcatccgttgctgattccactccgtacccagcgtcagcgtctggttaacgaggaaatcaatcggcaggttaacttcgctgtgcagcatcacgtcatcaagatcgatatcgacgaaatcctgtgtcgctttttcgttaaatttcccttcggtaccgcccgccagaccttccggaatacggctgttacgggtgtgttcgtactgcacccagttgctggtggtcacgccgttatcccagccaccgttccaggtcagcgcgtagttctggcgatacagacggttggtttcatcgccatatttgctgcgggtataggaatcggagttggtattctgggtgtcgcccgcatacaggttaccctggcggctgtaacctgcttccagttccaggctttgcaatggcgcgaaatcccagcgcaccacgccattaatatctttgttgattaccccttcgcgcccggctggtaacgtcgtggcatacgttccggcacgcgcggactgatggccctggttgatatcccacgcgtcagcctgggttttgtcgaggttgccatacaaacggaagctgaattcgtcgcccagcggaccggtcaggctaaagttagtgcgtttggtggcaccttcctctttatgttctggcgcattgaaatatgcgtcccaggagccgtgccactcgccgctgccttttttggtaatgatgttaaccacgccgcccgccgcgccgttgccataacgcgcagctgccggaccacgcagaacttcaatacgttcaatcatttcaggtggcacccaggaagtatcaccacgggtatcgcgctcgccacgccagccctgacgcacgctgttacggctgcttaccggcttgccgtcaatcaaaatcagcgtgttttccggacccataccgcgaatatcaatctgtcggttattcccacgctgaccactggtggagttaccggtcaggttaacgcctggcatggtacggatgatcttgctcacatcgcgggcaaccgggtttttgcggatttcatctgcggtgatggtgctaacgccaggcgcctgtaagttctgctcggcggcggtaacgacaatagtatcgtcatgactaacaggagtatcggtcggctcttgtgcctgcgctaccccataaatccccagattgaccaacaaggccagggaatgaatcttcttgttcattgttttattcctgcatttttgccacgaattgcaactgtcgggcatggtcgtcatcaacacgacgcatcccgctaccgcgaaaacctttgatcctgaaagacacgcagtgcagttggttaattaatgtccgcgcttcccacggcgcgccattacgctattgcaaatgcaaatagttatcaataatattatcaatatatttctgcaatcaatgaaaaattgcacagtaaacatggggttatggtgtgacggcgttaaaagtaggaagtgagagctggtggcagtcgaaacatggcccggaatggcagcgtctgaatgacgaaatgtttgaggtcactttctggtggcgtgatccccaaggttctgaagaatacagcacgataaagcgcgtatgggtctacatcactggtgtgaccgatcaccatcagaacagccagccccagagcatgcagcgaattgcaggcactaacgtctggcagtggacgacacaactcaatgccaactggcgcggcagctactgctttattcccaccgaacgcgatgacattttttctgtaccatcccccgatcgcctcgaattgcgcgaaggctggcgaaaactattaccccaggcgatagccgatccgctgaacctacaaagctggaaaggcgggcgagggcacgctgtttctgcactcgaaatgccgcaagcgcctctgcaaccgggatgggattgtccgcaagcgccagaaatacctgccaaagaaattatctggaaaagtgaacggttgaaaaagagtcggcgtgtatggatttttaccaccggcgatgcaacagcagaagaacgcccgctggcagttttgctcgatggcgaattttgggcgcaaagtatgcccgtctggccagtgctgactagcctgacccatcgtcagcaacttcctcccgccgtgtatgtgttgatcgacgctatcgacaccacgcaccgcgcccacgaactgccgtgtaatgcggatttctggctcgcagtacagcaagagttattacccctggtgaaagctattgccccttttagcgatcgtgccgatcgcaccgtggttgccgggcagagttttggtgggctttccgcgctgtatgccggactgcactggcctgaacgctttggctgtgtattaagccagagtggaagctactggtggccgcatcggggcgggcagcaagagggcgtgttacttgaaaagctaaaagctggtgaagttagcgccgaaggtctgcgcattgtgctggaagcgggtattcgcgagccgatgatcatgcgggccaatcaggcgctgtatgcgcaattacaccccataaaagaatccattttctggcgtcaggttgacggcggacatgatgcgctttgttggcgcggtggcttgatgcaggggctaatcgacctctggcaaccacttttccatgacaggagttgaatatggcattcagtaatcccttcgatgatccgcagggagcgttttacatattgcgcaatgcgcaggggtaattcagtctgtggccgcaacaatgcgtcttaccggcaggctgggacattgtgtgtcagccgcagagtcaggcgtcctgccagcagtggctggaagcccactggcgtactctgacaccgacgaattttacccagttgcaggaggcacaatgagccagcatttacctttggtcgccgcacagcccggcatctggatggcagaaaaactgagtgaattaccctccgcctggagcgtggcgcattacgttgagttaaccggagaggttgatagcccattactggcccgcgcggtggttgccggactagcgcaagcagatacgctgcggatgcgttttacggaagataacggcgaagtctggcagtgggtcgatgatgcgctgacgttcgaactgccagaaattatcgacctacgaaccaacattgatccgcacggtactgcgcaggcattaatgcaggcggatttgcaacaagatctgcgcgtcgatagcggtaaaccactggtctttcatcagctgatacaggtggcggataaccgctggtactggtatcagcgttatcaccatttgctggtcgatggctttagtttcccggccattacccgccagatcgccaatatttactgcacatggctgcgtggcgaaccaacgcctgctagcccatttacgcctttcgctgatgtagtggaagagtaccagcaataccgcgaaagcgaagcctggcagcgtgatgcggcattctgggcagaacagcgtcgtcaactgccgccgcccgcgagtctttctccggcacctttaccggggcgcagcgccagcgcagatattctgcgcctgaaactggaatttaccgacggggaattccgccagctggctacgcaacttagtggtgtgcagcgtaccgatttagcccttgcgctggcagccttgtggctggggcgattgtgcaatcgtatggactacgccgccggatttatctttatgcgtcgactgggcagcgcggcgctgacggctaccggacccgtgctcaacgttttgccgttgggtattcacattgcggcgcaagaaacgctgccggaactggcaacccgactggcagcacaactgaaaaaaatgcgtcgtcatcaacgttacgatgccgaacaaattgtccgtgacagcgggcgagcggcaggtgatgaaccgctgtttggtccggtactcaatatcaaggtatttgattaccaactggatattcctgatgttcaggcgcaaacccataccctggcaaccggtccggttaatgaccttgaactggccctgttcccggatgtacacggtgatttgagtattgagatcctcgccaataaacagcgttacgatgagccaacgttaatccagcatgctgaacgcctgaaaatgctgattgcccagttcgccgcggatccggcgctgttgtgcggcgatgtcgatattatgctgccaggtgagtatgcgcagctggcgcagctcaacgccactcaggttgagattccagaaaccacgcttagcgcgctggtggcagaacaagcggcaaaaacaccggatgctccggcgctggcagatgcgcgttacctgttcagctatcgggaaatgcgcgagcaggtggtggcgctggcgaatctgctgcgtgagcgcggcgttaaaccaggggacagcgtggcggtggcactaccgcgcagcgtctttttgaccctggcactccatgcgatagttgaagctggagcggcctggctaccgctggataccggctatccggacgatcgcctgaaaatgatgctggaagatgcgcgtccgagcctgttaattaccaccgacgatcaactgccgcgctttagcgatgttcccaatttaacaagcctttgctataacgccccgcttacaccgcagggcagtgcgccgctgcaacttagtcaaccgcatcacacggcttatatcatctttacctctggctccaccggcaggccgaaaggggtaatggtcgggcagacggctatcgtcaaccgcctgctttggatgcaaaatcattatccgcttacaggcgaagatgtcgttgcccaaaaaacgccgtgcagttttgatgtcagcgtgtgggagtttttctggccgtttatcgcaggggcaaaactggtgatggctgaaccggaagcgcaccgcgacccgctcgctatgcagcaattctttgccgaatatggcgtaacgaccacgcactttgtgccgagcatgctggcggcatttgttgccagcctgacgccgcaaaccgctcgccagagttgcgcgacgttgaaacaggttttctgtagtggtgaggccttaccggctgatttatgccgcgaatggcaacagttaactggcgcgccgttgcataatctatatggcccgacggaagcggcggtagatgtcagctggtatccggcttttggcgaggaactggcacaggtgcgcggcagcagtgtgccgattggttatccggtatggaatacgggtctgcgtattcttgatgcgatgatgcatccggtgccgccgggtgtggcgggtgatctctatctcactggcattcaactggcgcagggctatctcggacgccccgatctgaccgccagccgctttattgccgatccttttgccccaggtgaacggatgtaccgtaccggagacgttgcccgctggctggataacggcgcggtggagtacctcgggcgcagtgatgatcagctaaaaattcgcgggcagcgtatcgaactgggcgaaatcgatcgcgtgatgcaggcgctgccggatgtcgaacaagccgttacccacgcctgtgtgattaaccaggcggctgccaccggtggtgatgcgcgtcaattggtgggctatctggtgagccaaagcggcctgccgttggataccagcgcattgcaggcgcagcttcgtgaaacattgccaccacatatggtaccggtggttctgctgcaacttccacagttaccacttagcgccaacggcaagctggatcgcaaagccttaccgttgcctgaactgaaggcacaagcgccagggcgtgcgccgaaagcgggcagtgaaacgattatcgccgcggcattcagcagcttgctggggtgtgacgtgcaggatgccgatgctgatttcttcgcgcttggcggtcatagcctactggcaatgaaactggcagcgcagttaagtcggcaggttgcccgccaggtgacgccggggcaagtgatggtcgcgagtactgtcgccaaactggcaacgattattgatgctgaagaagacagcacccggcgtatgggattcgaaaccattctgccgttgcgtgaaggtaatggcccgacgctgttttgtttccatcctgcgtccggttttgcctggcagttcagcgtgctcagccgttatctcgatccacaatggagcattatcggcattcagagtccgcgccccaatggccccatgcagacggcggcaaacctggatgaagtctgcgaagcgcatctggcaacgttacttgaacaacaaccgcatggcccttattacctgctggggtattcccttggcggtacgctggcgcagggtattgcggcgcgactgcgtgcccgtggcgaacaggtggcatttcttggcttgctggatacctggccgccagaaacgcaaaactggcaggaaaaagaagctaatggtctggacccggaagtgctggcggagattaaccgcgaacgcgaggccttcctggcagcacagcagggaagtactagtacggagttgtttaccaccattgaaggcaactacgctgatgctgtgcgcctgctgacgactgctcatagcgtaccgtttgacggtaaagcgacgctgtttgttgctgaacgcacacttcaggaaggtatgagtcccgaacgcgcctggagcccgtggatagcggagctggatatctatcgtcaggattgtgcgcatgtggatattatctctccagggacgtttgaaaaaattgggccgattattcgcgcaacgctaaacaggtaaattaatattatttataaacccataattacagaaaataattatgggttttttatttgtttgatttataggtttgatgaatatttctcttaaatagagtgaatgttgcattcagtggaaggaatttacaaacttcagcttcggataattatcaccaactggtaaagtgagcgccgtggagatttccccctattggactcattttcaggttataccccatgagtagtctgaatattaaacagggaagtgacgctcattttcccgattatcctctggcgagccccagtaataatgaaattgatttacttaatctaatcagtgttttatggcgggccaaaaaaacggtcatggcggtcgtttttgcgtttgcctgcgcaggcttgctgatctctttcatcctgccgcaaaaatggaccagcgcggcggttgtcacgcctccagaacctgttcagtggcaagagttggagaaaagtttcactaagcttcgtgtgctggatctggatatcaaaattgatcgtacagaagcatttaacctgtttatcaagaagtttcagagcgttagcttgctggaagagtacctgcgtagtagtccttatgtgatggaccaattaaaagaggcgaaaatcgacgaactggatttgcatcgcgcaattgtcgcattgagcgaaaaaatgaaagcggttgatgacaatgccagtaagaaaaaagatgaaccgagtctgtatacctcctggacgctaagttttaccgcgccaaccagtgaagaggcgcagaccgttttgagcgggtatatcgattatatctctacgttggtggtgaaagagagcctagaaaacgtccgtaataaactggagatcaaaacccagtttgaaaaagaaaaactggctcaggatcgcattaaaacgaaaaatcaacttgatgcaaacattcagcgcctcaattatagtctcgacattgccaacgcggcaggaattaaaaagcccgtttacagtaatggtcaggccgttaaagatgaccccgatttttctatttctctcggtgcagacggtattgaacgcaaactggaaatagaaaaagcggtcactgacgttgcggaactgaacggtgaattacgtaatcggcagtatcttgtcgagcaattaacaaaagcacatgtcaacgatgtgaattttacgccgtttaaatatcagttaagcccgagtttgccagtgaaaaaagacggtccgggtaaggcgattattgtgatcctttccgcgttgatcggcgggatggtggcttgtggtggcgtgctgttgcgctatgcgatggcatccagaaaacaggatgccatgatggcagaccacttagtttaactatttgcggtactaggtgccgttcgtccgagcggcaccacaagcggcgttccggcaactggatcgtcaatgatcatgcagcgcagaccataaatgcgctcaatcagttcagcagtgacaatctccttcggcgctccctgagcaacaattttcccttcccgcaatgcaatcaaatggctggcgtaacgacaggcctgattaagatcgtgcagcaccgccgccagggtatagcctttttcgcggttcagttcgcttaacaactccagcaaatcaatctgatgactgatatccagccaggtcgtgggttcgtcgagcagcataattgccgtttcctgggccagcaccatcgcgatccacgctcgctggcgttgtccgccagaaagggtatccacgctttgatctgccagatgagttattcccgtggcctgcattgctttcgttaccgcttcttcatcctctttgcgccagcgggtaaacagcggttgatgcggataacgtccacgcgccaccagctcctgcacggtgatatcgcccggcgtggtagcattttgcgccaacagaccaatccggcgtgcaacctctttactggcgtaatgttgaatgtgctcgccatccagccagacatgcccatgagcaggcgtcatcaggcggcttaaggtacgcagtaacgtggatttaccgcagccatttggcccgataattgccgtgaagtgaccatcaggtatttctacagtcagattttccgcaacggtatatttgccatatcccagggttaactgttcgccgcgcaaacgggctacactttcggtcattttttgcgagactcctgaattaacaagacgataaggtaaataccgccgaggctgacggtaacgacgccaaccggaagttgatacggcataaacagttgttgggcgcagagatcggccgccagcagtaacagcgccccgcatagcgccgcctgggttagcccccagcgagcggtgccgctaatgcgtcgggcaatgtgcggtgcgactaaagcaataaaggaaatcggcccggcaagcgctgttgccgcagcggtaagcaccactgcaaccagcatcattaacagacggctacgttcgacgctgacgcccagcgcacacgcggtatcatcgcccatttccagcaagcgcatccggcgtaccagtaaggcggcggcaatgagcatcaatataatgatgggtgcggaagggctggtttttgcccacgtcaggccgttgaggcttccggcattccacaaacctgctgttagcgccgtttctaaagacgctttcagcaacagccaggtattaaaggccaccagcatggcgcgaacgccgataccgataataatcaaccgaaaggtgtcgatgccgttgcgccaggcgagcagccagaccagcaggctagtgacaatgccgcccaccattgcactcagcgcgatagccgtcaggtcctgaccaaacagcaccatcgccaccagcacgccgctccacgccccggtgttaaagcccattacgtcagggctgccgagcgggttacgcatcaggctctgaaaaatcgcgccactgacgcccagtgctgcgccaatcaacagcgccatcagcacgcgtggtaaacgccattcggtgaccaccatcgtcatactgcgcggcgcatcgcccatcagcgcggcgaatacctggctggtttccagcgtgacggcaccgctgcgtaatccccagatacctgcaaccacacaggcggaaaccagcagcaaacaggtgatgagtaatcggcgagagacgtaaatcatgcaccacctcgcgttttacgtcgcacgaggaagatcagcaccggtgcaccaataaacgcactgaccacagaaacgcgcagttcgccgggcacaatcacccgcccgatgatatcggcaaacagcagcagggcaggggtagcaagtagcgtgacgggcaggctccagcgatgatcggcacccaccagccaacgcgccatatgcggcatcatcaggccaataaaggcaatcgggccaactattgccgtcgcactaccacaaagcacggtaatcgccagcagaccaatcaactgtgtgcgcgccacgcgactgcccagcgccgtcgcggtgtcgctgccgaggctcaaactgttcagcgcgcgactcagtaatagcgcagttgctccggcgatcagcaccgggatcagcaccacttttaaggtatgtagattgcgaatatccaggctaccggcttgccagaaacgcaactgatcgtagacgtcaggattaagcagggcgatgccgctggtcagtccttccagcaccgccgccagcgccacgcccgccagggttaaacgcaccggacttaactgcccgccgccctgactgccggtaaaggcaacaatcaaactggccaccagcgccccggcgaaggccatcgccagttgttcctgcgcggaagagtaaccaaacagcgccgcacccagcacaatggcaaagctggctccggcgttcacgccaagcaagccggggtcggcaagtgggtttcgggtgagggtttgcattaacgccccggcaaggccaagcgcgccgcctgccagtaaaccggcaagggtacgcggcagccgcgcgtcgagcacgatggtgcagtcggcgctctggcaggtgccggagaaggcctccagcactacggaagcggggagactttttgccccaatgagcaggcttaatgccgtcgcgataatcagtaataacagcaatccgggcacggcaatggcgcgtgtcacggcaacagaaccagacatacgaacttccatgataatgaaattaattatcgttatcgatcttatttggatatgttagcatgtgcagcctaagaataggtatttaaaatatttgatggcaaggcattgtaatgaataaacaatcctggctgcttaacctcagcctgttgaaaacgcacccggcgtttcgcgcagtattcctcgctcgtttcatcagtattgtgtctctgggtttgctcggcgtcgcggtgccggtgcagatccagatgatgacacattccacctggcaggtggggcttagcgtgacgctgaccggcggcgcgatgtttgttggcctgatggtcggcggtgtgctggcggatcgctatgagcgcaaaaaagtgattttgctggcgcgcggcacctgtggcattggcttcattggactgtgccttaatgcactgctgccggagccgagtttgctggcaatctatttacttggtttatgggatggttttttcgcaagccttggcgttacggcgctattggcggcgacaccagcactggtagggcgtgaaaacttaatgcaggccggggcgatcaccatgttgaccgtgcgtctggggagcgtgattagccccatgattggcggtttattgctggcgaccggtggcgtagcctggaactacgggctggcggcggcgggcacgtttattaccttgctaccgttgttaagccttccggcgttgccaccgccaccgcagccgcgtgagcatccgttgaaaagtttactggcaggatttcgttttctgcttgccagcccgctggtgggcgggattgcgctgctgggtggtttattgacgatggcgagcgcggtgcgggtactgtatccggcgctggctgacaactggcagatgagtgcggcacagattggttttctctacgcggcgatcccgctcggcgcggctattggtgcgttaaccagcgggaagctggcacatagtgcgcgaccagggttattgatgctgctctccacgctgggaagcttcctcgccattggtctgtttggcctgatgccgatgtggattttaggcgtggtttgtctggcgctgttcggctggttgagtgcggtcagcagcttgctgcaatacacaatgctgcaaacgcaaaccccggaagcgatgttagggcggattaacggtttgtggacggcgcagaacgtgacgggcgatgccataggcgcggcgctgctgggtggtttgggcgcgatgatgacaccggttgcttccgcaagcgcgagcggttttggtttgttgattatcggcgtgttgttattgctggtgctggtggagttgcgacattttcgccagacgccgccgcaggtgacagcgtccgacagttaatgcttaaaacagcgccttaagcctatccagcacttgcatggcgctgtagtaatccagacggaacgtctcggttcccagcgcataaacctgcttgttttgtactgcaggcaggtgcgcgagcagcggattagcataaatagcatcggcatctttctgatcaccggcgaacaggaatagactctcgccatttaaccctgcagccagattttccccaccaagctgaatgatgtcatggcgtttaccctgactttggctggcatttaaccctgcgggtaacttcgccagcgtaaagccgagttgttccagcatctgcccttgtgcactttctggcgtccagagattggcactgtgtgcagcggcagtatagacaatggcagtgaccggctgcggcggtaatttgatttgctctttcgccgccgccagttgcttatcaaactgcgcaatccgctctgccgcttgtttctcatgcccggtaatttcgccaagttgcgttaacaggctctgccagcttttgtcgtcgtaattgatgattaatgtcggggcgatggtggaaagctgatcatacagtgccagcgcgctatccccgccggttgcgctaattaaaatcagatccggcatttgcgcggcaacggcttcggcgctcggttcgccgatatagagccgttgcagtttgcgttctttcgccaccttgctccactggcgtaaaaagccctggtcatccgcgacgcggttattcggcgtggtcgcgccgctggcgatcaccggagcatcaatcgccagcagactgccggtcagggtgacgctggtggaaacaatacgctgcggctggctttccagtgtatgtgtgccacggctgtcagtaatctgacgcggccagtcagcggcctgaactgcggctattccactaagcaaaagtcctgttaatagaagggcgttgcggtagagcggggcgagtctcacaaatcagcttcctgttattaataaggttaagggcgtaatgacaaattcgacaaagcgcacaatccgtcccctcgcccctttggggagagggttagggtgaggggaacagccagcactggtgcgaacattaaccctcaccccagccctcaccctggaagggagagggggcagaacggcgcaggacatcacattgcgcttatgcgaatccatcaataatgcttctcattttcattgtaaccacaaccagatgcaaccccgagttgcagattgcgttacctcaagagttgacatagtgcgcgtttgcttttaggttagcgaccgaaaatataaatgataatcattattaaagcctttatcattttgtggaggatgatatggatacgagtctggctgaggaagtacagcagaccatggcaacacttgcgcccaatcgctttttctttatgagcccgtaccgcagttttacgacgagtggatgtttcgcccgcttcgatgaaccggctgtgaacggggatagccccgacagtcccttccagcaaaaactcgccgcgctgtttgccgatgccaaagcgcagggcatcaaaaatccggtgatggtcggggcgattcccttcgatccacgtcagcctagcagcctgtatattcctgaatcctggcagagcttctcccgtcaggaaaaacaagcttccgcacgccgtttcacccgcagccagagcctgaatgtggtggaacgccaggcaattccggagcaaaccacgtttgaacagatggttgcccgcgccgccgcacttaccgccacgccgcaggtcgacaaagtggtgttgagtcggttgattgatatcaccactgacgccgccattgatagtggcgtattgctggaacggttgattgcgcaaaacccggttagttacaacttccatgttccgctggctgatggtggcgtcctgctgggggccagcccggaactgctgctacgtaaagacggcgagcgttttagctccattccgttagccggttccgcgcgtcgtcagccggatgaagtgctcgatcgcgaagcaggtaatcgtctgctggcgagtgaaaaagatcgccatgaacatgaactggtgactcaggcgatgaaagaggtactgcgcgaacgcagtagtgagttacacgttccttcttctccacagctgatcaccacgccgacgctgtggcatctcgcaactccctttgaaggtaaagcgaatagccaagaaaacgcactgactctggcctgtctgctgcatccgacccccgcgctgagcggtttcccgcatcaggccgcgacccaggttattgctgaactggaaccgttcgaccgcgaactgtttggcggcattgtgggttggtgtgacagcgaaggtaacggcgaatgggtggtgaccatccgctgcgcgaagctgcgggaaaatcaggtgcgtctgtttgccggagcggggattgtgcctgcgagcagtccgttgggtgagtggcgcgaaacaggcgtcaaactttctaccatgttgaacgtttttggattgcattaaggagcgaggatgagcattccattcacccgctggccggaagagtttgcccgtcgctatcgggaaaaaggctactggcaggatttgccgctgaccgacattctgacgcgacatgctgcgagtgacagcatcgcggttatcgacggcgagcgacagttgagttatcgggagctgaatcaggcggcggataacctcgcgtgtagtttacgccgtcagggcattaaacctggtgaaaccgcgctggtacaactgggtaacgtcgctgaattgtatattacctttttcgcgctgctgaaactgggcgttgcgccggtgctggcgttgttcagccatcagcgtagtgaactgaacgcctatgccagccagattgaacccgcattgctgattgccgatcgccaacatgcgctgtttagcggggatgatttcctcaatactttcgtcacagaacattcctccattcgcgtggtgcaactgctcaacgacagcggtgagcataacttgcaggatgcgattaaccatccggctgaggattttactgccacgccaagtcctgctgatgaagtggcctatttccagctttccggtggcaccaccggcacaccgaaactgatcccgcgcactcataacgactactactacagcgtgcgtcgtagcgtcgagatttgtcagttcacacaacagacacgctacctgtgcgcgatcccggcggctcataactacgccatgagtagcccaggaagcctgggcgtctttcttgccggaggaacggttgttctggcggccgatcccagcgccacgctctgtttcccattgattgaaaaacatcaggttaacgttaccgcgctggtgccacccgcagtcagcctgtggttgcaggcgctgatcgaaggcgaaagccgggcgcagcttgccagcctgaaactgttacaggtcggcggcgcacgtctttctgccacccttgcggcgcgtattcccgctgagattggctgtcagttgcagcaggtgtttggcatggcggaagggctggtgaactacacccgacttgatgatagcgcggagaaaattatccatacccagggttacccaatgtgtccggatgacgaagtatgggttgccgatgccgaaggaaatccactgccgcaaggggaagtcggacgcctgatgacgcgcgggccgtacaccttccgcggctattacaaaagtccacagcacaatgccagcgcctttgatgccaacggtttttactgttccggcgatctgatctctattgatccagagggttacatcaccgtgcaggggcgcgagaaagatcagattaaccgtggcggcgagaagatcgctgccgaagagatcgaaaacctgctgctgcgccacccggcggtgatctacgccgcactggtgagcatggaagatgagctgatgggcgaaaaaagctgcgcttatctggtggtaaaagagccgctgcgcgcggtgcaggtgcgtcgtttcctgcgtgaacagggtattgccgaatttaaattaccggatcgcgtggagtgtgtggatagtcttccgctgacggcggtcgggaaagtcgataaaaaacaattacgtcagtggctggcgagtcgcgcaagtgcctgaaggagagaacacgatggctattccaaaattacaggcttacgcactgccggagtctcacgatattccgcagaataaagttgactgggcctttgaaccgcaacgtgccgcgttgttaatccatgatatgcaggactattttgtcagcttctggggcgagaactgcccgatgatggagcaggtgatcgcgaatattgctgcgctgcgcgactactgcaaacagcacaatatcccggtttattacaccgcccagccgaaagagcagagcgatgaagatcgggcgctgttgaatgatatgtgggggccgggcctgacccgcagcccggaacagcaaaaggtggtggatcgcctgacgccagatgccgacgacacggtgctggtgaagtggcgctacagcgcgtttcatcgttctccgctggagcaaatgctgaaagagagtggacgtaaccagctgattattaccggggtatatgcccacattggctgtatgaccaccgcaaccgacgcatttatgcgcgatattaaaccgtttatggtggcggatgcgctggccgatttcagccgtgacgagcatttgatgagcctgaaatatgtggccggacgttctggccgggtggtgatgactgaagaattactgccagcacctatccccgccagcaaagcggcgctgcgtgaggtgatcctgccgttgctggacgagtccgatgaaccgttcgatgacgacaacctgatcgactacggtctggatagcgtgcgcatgatggcgctggcggcgcgctggcgcaaagtgcatggtgatatcgactttgtcatgctggcgaaaaacccgaccatcgacgcctggtggaagctactctcccgcgaggtgaaataatggatttcagcggtaaaaatgtctgggtaaccggcgcaggtaaaggtatcggctacgccacggcgctggcgtttgttgaggcgggagcgaaagttacaggttttgatcaagcgttcactcaggagcaatatccctttgcgaccgaagtgatggatgttgccgacgctgcgcaggtcgcgcaagtgtgtcagcgactgttagctgaaacggagcgactggacgcgctggtcaatgcggcgggaattttacgcatgggcgcgaccgatcagctcagtaaagaggactggcagcagacttttgcggttaacgtcggcggtgcgtttaacctgttccagcaaaccatgaaccagtttcgccgtcagcggggcggggcgattgtcactgtggcgtccgacgccgcgcacacgccgcgtattggcatgagtgcttatggcgcaagcaaagcggcgctgaaaagcctggcgttgagcgtcgggctggaactggcgggtagcggcgtgcgctgtaatgtggttagccctggctccaccgacaccgatatgcaacgcacgctgtgggtgagcgatgacgccgaagaacagcgtattcgcggctttggcgagcagtttaaactcggcattccgctggggaaaatcgcccgtccacaagagatcgccaacacgattttgttcctcgcctctgacctcgccagccatattaccctacaggatattgtggtcgatggcggcagtacgctgggggcataagcatgatctggaaacgccatttaacgctcgacgaactgaacgccaccagcgataacacaatggtggcgcatctgggaattgtgtatacccgtctgggcgatgatgtgctggaagccgaaatgccggttgatacccgtactcatcagccgttcggtttactacatggcggcgcgagcgcggcgctggcggaaacgctgggaagcatggccggatttatgatgacccgcgacggacagtgtgtggtaggcacagaacttaatgcaacacaccatcgcccggtgtctgagggaaaggtacgcggcgtctgccagccgctgcatcttggtcggcaaaatcagagctgggaaatcgtcgttttcgatgaacaggggcggcgttgctgcacttgtcggctgggtacggcagttttgggatgaacccgacagaattagatgagattgcaggaaaactcggttaacggagtgatcgagttaacattgttaagttaaatattggtttcaactccgatttacatggttgctgtgttgttaaattgtacaaagatgttatagaaacaaaatgtaacatctctatggacacgcacacggataacaactatgaacaaaagtgggaaatacctcgtctggacagtgctctctgtaatgggagcatttgctctgggatacattgctttaaatcgtggggaacagatcaacgcgctgtggattgtggtggcgagcgtctgtatctatctgatcgcttaccgtttttatgggctgtatatcgccaaaaatgtgctggcggttgacccgacgcgtatgacgccagcggtgcgccataacgacgggctggactatgtgccgacggacaagaaagtgctgttcggtcaccattttgcggccattgccggagcaggtccgctggtggggccggtactggcggcgcaaatgggctacctgccggggatgatctggctgctcgctggggtggttctcgccggtgcggtgcaggatttcatggtgctgtttgtttctacgcgccgtgacggtcgcagcctgggtgagctggtcaaagaagagatggggccaaccgccggggtgattgcgctggtggcctgctttatgatcatggtcattatccttgcagtgctggcgatgatcgtggtgaaagccctgactcatagcccgtggggaacatataccgttgcgttcaccattccgctggcgctgtttatggggatctacctgcgctatctgcgtccggggcgtattggcgaagtgagcgtcatcggtctggtattcctgattttcgccattatctctggcggctgggtggcagaaagtccgacctgggcaccgtactttgactttaccggcgtgcagttgacctggatgctggtgggttacggttttgtggcggcggtgctgccggtgtggttactgctggccccgcgtgactacctctctaccttcctgaaaatcgggactatcgtcggtctggcggtaggcattttgattatgcgcccgacgctgaccatgcctgcgctgaccaaatttgtcgatggcactggcccggtatggaccggtaacctgttcccgttcctgtttatcaccatcgcctgtggcgcggtgtctggcttccatgcgctgatctcttctgggaccacgccgaagatgctggcgaacgaagggcaggcgtgctttatcggctacggtgggatgttaatggaatccttcgtggcgattatggcgctggtttccgcctgtatcatcgatccgggcgtgtattttgccatgaacagcccgatggcggtgctggctccggcagggacggcggatgtggtcgcttctgccgcgcaggtggtgagtagctggggctttagcattacaccagatacgctaaaccagattgccagcgaagtgggtgaacagagcatcatttcccgtgcgggcggtgcgccgacgctggcggtggggatggcctacattctgcacggcgcgctgggcggcatgatggatgtggcgttctggtatcacttcgccattttgtttgaagcactgtttattctgacggcggtggatgcaggtacgcgtgctgcgcgctttatgttgcaggatctgctgggcgtggtgtctcctggcctgaagcggaccgatagtctgcctgctaacctgctggcaacagcgctgtgcgtactggcgtggggctacttcctccatcagggcgtggtcgatccgctgggcggcattaacactctgtggccgctgtttggtattgccaaccagatgctggcagggatggcgctgatgctctgtgccgtggtgttgttcaagatgaaacgtcaacgttacgcctgggtggcgctggtaccaacggcctggctgctgatttgtaccctgaccgcaggctggcagaaagcgtttagcccggatgcgaaagtcggcttcctggccattgctaataagttccaggcaatgatcgacagcggcaatattccgagccagtatactgagagtcagctggcgcaactggtgttcaacaaccgtctggatgccgggttaaccatcttctttatggtggtcgtggtggttctggcactgttcagcattaagacggcacttgcggcattgaaagatccgaagccaacggcgaaagaaacgccgtatgaaccaatgccggaaaatgtcgaggagatcgtggcgcaggcaaaaggcgcacactaaagtcagagtgagggggggatgttggcgaatgttggcttagtgcccagggttccctctcaccctaaccctctccccggtggggcgaggggactgaccgagcgcgttgatagcatttgtaggccggataaggcgttcacgccgcatccggcactctttcagcaacatggttagcggaggccaagatgtttgatagtctggcaaaagccggaaaatatttaggtcaggcggcgaagctgatgattggtatgcctgattacgacaactatgtcgaacatatgcgggttaaccatcccgatcaaacgccgatgacctacgaagagtttttccgtgagcggcaggacgcgcgctacggtggaaaaggcggcgcgcgctgctgctaaatttgtacgtcaggctttaaagctttccacttttttgaacgctgcacgcaacgtatctggtgtcagcgtgactggcaggtaatgaatggactccaccggacgcagggtgtgggcaatcactttgtcgatctccgcctgattattgatatccacttccagctccgccagtgtagtcggcagatgaaaacgctgatacgctccagttaattgcgccagcacatcatcctgacccagcaaggcgctttgcaccagaattccgtaggcgactttggtgccgtggagaaacttctcggtttgcggcagcacggtcagaccgttatgcacggcatgagctgccgccacacgcgtaaaacgatcgcccagaccaccaaccatcccaccaccagcaataatagcatccaccacatcgcaaaaactttgcgttaactgttgattttgctgatcgctcagcgcctgttcgctactgtttaacaagacgtcgcgaatggcttgcgcattattgatccccagtcgcacggttagcggcaacgtttctggttgcggagccagcaccaccgcttcataccatttcgccagcgtgtcaccgatccccgccagcagatattgttgcggtgcattgaggataatctccggttccaccagcaccataaaattggcgtcgtcgaaaatctcataatgcagcgcctgtccggcatcattataccagacggagagcggtgtccaggcggcgcaggtggcggcgatcgtcggaacggcaacaaacggcagaccgagacggcgggcgagggctttcgcggtgtcgagcagtgcaccgccaccgacgccaatcaccacgctgcggtcgtcaccggactcagccgccagttgttgtacatcgctttcgctgcaatgaccgcgaaacaaaatatgctttgcccctggcagtccaaacgctggcggaagtttggtttgcgccgcagcaatggcgcgtttgccgtagatccacaccgcgcgagaaagttgttcatcagtgaaaaaatcgtgcaggtgattgaaacttcctggatgactaaagtagttagccgggccgacgaccacgcggataggattgtgaggcatgttgtgttgtccttattgttttatttagacatctaaacgtcttgattgccaaatactagcatcgtgttatagtgccttcaacacgcaacttcgtcaggtacaataaaaatgacaaataaccctctgattccacaaagcaaacttccacaacttggcaccactattttcacccagatgagcgcgctggcgcagcaacaccaggcgattaacctgagccaaggctttcctgattttgatggtccgcgctatttacaggagcggctggcgcaccacgttgcacagggggcaaaccaatacgcgcccatgaccggcgtgcaggccttgcgcgaggcgattgctcagaaaacggaacgtttgtatggctatcaaccagatgccgatagcgatatcaccgtaacggcaggggcgacggaagcgttatacgcggcgattaccgcactggtgcgcaatggcgatgaagtgatttgttttgatcccagctatgacagttacgcccccgccatcgcgctttctgggggaatagtgaagcgtatggcactgcaaccaccgcattttcgcgttgactggcaggaatttgccgcattattaagcgagcgcaccagactggtgatcctcaacactccgcataaccccagtgcaactgtctggcagcaggctgatttcgccgctttgtggcaggcgatcgccgggcacgagatttttgtcattagcgatgaagtctacgagcacatcaactttagtcaacagggccatgccagtgtgctggcgcatccgcagctgcgtgagcgggcagtggcggtttctagttttggcaagacctatcatatgaccggctggaaagtgggttattgtgttgcgccagcgcccatcagcgccgaaattcgcaaggtacatcagtatctgacctttagcgtgaataccccggcacagctggcgcttgctgatatgctacgtgcagaacctgagcattatcttgcgttaccggacttttatcgccagaagcgcgatattctggtgaatgctttaaatgaaagccggctggagattttaccgtgtgaaggtacatactttttgctggtggattacagcgcggtttctaccctggatgatgttgagttttgccagtggctgacgcaggagcacggcgtagcggcgattccgctgagcgtgttttgcgccgatcccttcccacataaactgattcgtctctgttttgccaagaaggaaagcacgttgctggcagcagctgaacgcctgcgccagctttaattatttaaccgtccaggcgcgggaatattgacggtcggcaaacaactcttgcaggccgttaatttgcttcaggcgcagcacttcgtcgctgtccattcccagctctttgccaattttattatcgtcccatcccaactggctaagttcacggacgatttcgctcatggcggtgatttgatggcgtccacgagcgcgattatgacgaatagtcgcggcgatgcgttgattacgcgtaccttccagacaggtcaccggcaaataaccttttaagcgtaattttaaactactactgcctttaccaatttcatggcggtgaaaaccatccacgatttccatggcatttttatccgtatgtgtgaccacaatgggttgggtaaaaccatctatttcaatggatttttgcagcagttttttttcgggtggtgccacgttgtttgggttgtaatcattaggcataagttggctgtttttaacccacagaacgcaatccactggctcttcacgaaaggggctaacctgatggatcgccatgcggatttcattaatcgctttgatgcgatcatcttccggcaagctggcgagaaattgcgttaaatcctgcgttaatcgttgttgcatagtatcccccattcctgacgttttccttttatccgttcgttataacgctgatagttcttgctttttgtggggctaaaacttaatgcccgacaccagtaatcgttattgagtaaaactttgcatatccgccgccaggaggggatatctttcgcgccaatgtccccttgctgggtttgtggaacctcgatgccttttttctgataccagtgcaaataaatggcgattttattgcggtaatgctcagctgttttttccggcatgctattgagcagcaataatgcatattcttgccagtctaaatgttctggcttgaggattttccgatgcccatagaaatgattgtcatgtccggcgtaaatgccgccactttttaccccgctgactcgtgcgcacatagcagcccagcgatccggttcgataacgtgatagagccataatccttgtcgttgctccgggccaaaaggttcgcaaattcgcatatgacgcagaggaacgcctgcctgatacattaggttatacagtgggttgcagagactttgatgatttgcataccaggtccagatatcagccactttccagtcgtaaatggggtaaatgtaccagctatgaccgcctggtgcggccgtagtccagggtttatcgtcggcaaaacgttgtttatttaaactggcgatggcgacaaaacggttgtaggactcatccgcacggatgccgatcatcatcgccgccggacgtttttgactaaaccattcggcaaactcacgtacaaattgttcgaaggtcatgcctggctggtaaaagcagaaaaagtcagggtcggttatcgcatcttggggaggttgacgtacccattcgacatcaggttcccagcactgccattcgggttggtattgactaagggaattttgcgtcgtaagcgggagcgcaacccagtaaaactcttcgatgacatcggtgtacaactcgcgcagggactgaacatagttaatggtgcaagagaattgcgcctcccagtcgataaacaaaacgcagatttttttgcccatttgtcgggcaagttcggctgtcagatgcagcattaaaccagagtctttgccgccagaaaaactgacacaaacgcggggtagggtgttgagtgtccaggtaatacgctctcgtgcagcttccagaatattgagcggaagaggaattttataaatagacatctgaagacgctctctgaacgttacagggtgatcagtgagataagtctgttaattataaagtaaacactgtaaagcagagtgttttatttttcattcgcgctgtgaataaatagatgaaagttatagtagctgtctgtagttatatatcaaaaactctcatttagacggtcaataaatcgggagaacaccaaattatttaaagaagatttattataggaaatgtaaagctttatactaggtaacggatgttctagttttatctcttttaagttaagaaagtcacggtaggaattataaagttcataggggactattcccagtaaatctgtaactgcaatgctattaatgattgtcagcaaagaggaaccacgaaaactgattttgcgattcataaatctctcgtctatttccatttgaatatcatcaacccctgcacttttagatattaattgggtgaactcttctgccataatttgttcataagtgctattgtcagtaattcgtggatgcctattactacaaattagagtattgcgaatcgtatgcaatggcatgcaaatgacggaacggctgatcactggcatttgggtgatcaccagatcggctttgcggtgaaccaacagttcttcagcattctctgcactcatgaggatatcatggcactcaatctcgacagaggaatcttgccgtaggcagcggatcagcatactattattagagcaagaaatgagctgagggccgtagataataaagtttttctttagttcggacttattgactatattaattgtttgttcaaggcctctgagatttttctcaagatggtgatgcagatttaaccctgttgtcgtcggcgcgataccttttccactgcgaatgaataaagggtcattaaattgcgcacgtaagcgttgtaagctctggctcacggcacttggggtgatatatagactttcagcagctttgctaatgcttaaatgctggtaaatacactcaaatatgacaagaagatttaagtcgaactttttcaagtcgtagagattggccatacactactccggttatatttttcttccatgatatattcacttaatcaatgttttttgcgtatatatttttattgattatgtttttttgcttaactcaggattaagtttttctaaaatagcacagccacttagggcagagcgagcaattcatgcttttttaggatggttgaaaagcagggatatagttcaaccatccatgaattaccttttatttattccccataatgatattaagcgttttctgatcgggcaaccccacggcctgttgtagcgtattttccttactcatgtaatagatagccggcgtgacatttgcccccagatcgtccatcagtttctcattgtcacttaacactttcatttgctctgtacttacgtttgcaggcacgtttagcttaagcttgccaccagaggcttcatattgttgccaggtttttgcgggatctttggaggcaagaattgccgctgctgtcgccgggctttctggcttgataaccccaaccaacaatgttcttaattgcactttgccagaatctacccacgggcgcgcctgctgccagaactgtttacaatatgggcagaacggatcggcgaagacgtagacaatgaccggcgcatcttttttaccgtcgaggagccagtgggattgttccatccgttgccacatttcgcgtccggctggtgcgtaaatttctttttcgataagtgtgttactcaggttttcacctttctcgttgtacatgtaaccagagatagcgtgcttaccatctggagtcaggtagatggtgacgcccatatcctgatactttccgagataacctttcattcctccgggggcatcgaatgttttgatgattgtaatgccctgtttttcaatcgcttttactggagcaggaagttcctctgcgaaggcgattgcaggaagcagagccagtaaaagtatcttttttaacattaatttgtccttttcagtcagtgcaaaagtcgagtaaaaggcataacctatcactgtcataggtaagagcttagatcaggtgattgccctttgtttatgagggtgttgtaatccatgtcgttgttgcatttgtaagggcaacacctcagcctgcaggcaggcactgaagataccaaagggtagttcagattacacggtcacctggaaagggggccattttactttttatcgccgctggcggtgcaaagttcacaaagttgtcttacgaaggttgtaaggtaaaacttatcgatttgataatggaaacgcattagccgaatcggcaaaaattggttaccttacatctcatcgaaaacacggaggaagtatagatgtccttgattaacaccaaaattaaaccttttaaaaaccaggcattcaaaaacggcgaattcatcgaaatcaccgaaaaagataccgaaggccgctggagcgtcttcttcttctacccggctgactttactttcgtatgcccgaccgaactgggtgacgttgctgaccactacgaagaactgcagaaactgggcgtagacgtatacgcagtatctaccgatactcacttcacccacaaagcatggcacagcagctctgaaaccatcgctaaaatcaaatatgcgatgatcggcgacccgactggcgccctgacccgtaacttcgacaacatgcgtgaagatgaaggtctggctgaccgtgcgaccttcgttgttgacccgcagggtatcatccaggcaatcgaagttaccgctgaaggcattggccgtgacgcgtctgacctgctgcgtaaaatcaaagcagcacagtacgtagcttctcacccaggtgaagtttgcccggctaaatggaaagaaggtgaagcaactctggctccgtctctggacctggttggtaaaatctaaatttccttcgtctttcacgccatagcggcgttggcgtcgcccgctcaccccggtcacttacttgtgtaagctcccggggattcacaggctagccgccttgctctgacgcgaaatacttcggaaattcacctaattcttcgggtgctgcggcacccgattttcttccccgcaccatgatgcaagctgcatccaggtagccgcagaggccgcttgcatgatgatgtttaaagcccaggagataaacatgctcgacacaaatatgaaaactcaactcaaggcttaccttgagaaattgaccaagcctgttgagttaattgccacgctggatgacagcgctaaaagcgcagaaatcaaggaactgttggctgaaatcgcagaactgagtgacaaagtcacctttaaagaagataacagcttgccggtgcgtaagccgtctttcctgatcaccaacccaggttccaaccaggggccacgttttgcaggctccccgctgggccacgagttcaccagcctggtactggcgttgctgtggaccggtggtcatccgagcaaagaagcgcagtctctgctggagcagattcgccatattgacggtgattttgaattcgaaacctattacagcctctcttgccacaactgcccggacgtggtgcaggcgctgaacctgatgagcgtactgaacccgcgcatcaagcacactgcaattgacggcggcaccttccagaacgaaatcaccgatcgcaacgtgatgggcgttccggcagtgttcgtaaacgggaaagagtttggtcagggccgcatgacgttgactgaaatcgttgccaaaattgatactggcgcggaaaaacgtgcggcagaagagctgaacaagcgtgatgcttatgacgtattaatcgtcggttccggcccggcgggtgcagcggcagcaatttactccgcacgtaaaggcatccgtaccggtctgatgggcgaacgttttggtggtcagatcctcgataccgttgatatcgaaaactacatttctgtaccgaagactgaagggcagaagctggcaggcgcactgaaagttcacgttgatgaatacgacgttgatgtgatcgacagccagagcgccagcaaactgatcccagcagcagttgaaggtggtctgcatcagattgaaacagcttctggcgcggtactgaaagcacgcagcattatcgtggcgaccggtgcaaaatggcgcaacatgaacgttccgggcgaagatcagtatcgcaccaaaggcgtgacctactgcccgcactgcgacggcccgctgtttaaaggtaaacgcgtagcggttatcggcggcggtaactccggcgtggaagcggcaattgacctggcgggtatcgttgagcacgtaacgctgctggaatttgcgccagaaatgaaagccgaccaggttctgcaggacaaactgcgcagcctgaaaaacgtcgacattattctgaatgcgcaaaccacggaagtgaaaggcgacggcagcaaagtcgttggtctggaatatcgagatcgtgtcagcggcgatattcacaacatcgaactggccggtattttcgtccagattggtctgctgccgaacaccaactggctcgaaggcgcagtcgaacgtaaccgcatgggcgagattatcattgatgcgaaatgcgaaaccaacgtgaaaggcgtgttcgcagcgggtgactgtacgacggttccgtacaagcagatcatcatcgccactggcgaaggtgccaaagcctctctgagtgcttttgactacctgattcgcaccaaaactgcataagaagaagtaagattcacctgcaattgcttagccgccggggtcaaacctggcggcttttttatggcattaaaaagccccgccgggatggctccgggcagggcgggatacttattctggcaattaacgcacaaccagcaccggcagattggcgtggcggatcacgctgctggcgttagaacctaacagatgggtgctaatgcttgggttgcgagaaccaataactacaacatcagcccccagttcttctgccaactcattgacttcatcccgcacgctaccaaaacggacatgttgtttaatgcgggaaggatcgatggtgaagtggctgaccatcgtttgcagacgttcttgtgcttcatgttgcagatgctcttcaaaacgacgcacatcagcggcaaaacggtgcaggctcaggctggcactcccgggtagtacgtgaagtagatgaataactccgtcatcctgggcgaggaattcagcgtggcgaacagctttgtcgctcaattccatttcaaatacatcaactggcataatgattgtcttatacataaccctttctccctgttaatcatgaacaaatcattcgccatgattataatatttatccctgatatttgtctggttctttttccttacgaactgtttctgtgatgaatatattctcactgaacaccaggaattctcccaaaacctgtggtaccgcccgttttcccgctgtgatagctacccttaaagactgactcttttttgaactgtctctggaggttgcatgaaagcattgacttatcacggcccacatcacgttcaggtagaaaatgttcccgatccgggcgttgaacaggcagatgatattattctgcgtattacggcaacggcgatctgtggctctgacctccatctttatcgaggcaaaatacctcaggttaaacatggcgatatttttggtcatgaatttatgggggaagtagttgaaaccggaaaggacgtaaaaaatttgcaaaaaggcgaccgagtggtaattccgttcgtcattgcttgtggcgactgttttttctgtcgattgcaacaatatgccgcctgcgaaaataccaatgcgggtaaaggcgctgcgctcaataaaaaacagataccagctccagcggcattgtttggttatagtcacctgtatggcggcgttcctggtgggcaggcggaatatgtccgcgtccctaaagggaatgtggggccgtttaaagtaccgcctttgcttagtgatgataaagcgcttttcctttctgatattctgccaacggcatggcaggcagcaaaaaatgcgcagatccaacaaggtagtagcgttgcagtctatggtgctggtcctgtgggattgttgacaatcgcctgtgcacggttgctcggtgcggaacagatttttgttgttgatcatcatccctaccgcttgcatttcgccgccgaccgctacggcgcgatcccgattaattttgatgaagacagcgatccggcacagagtattattgaacaaacggcaggtcaccggggcgtggatgcagtaatagacgccgtcggttttgaagcgaaaggcagcaccacggaaacggtgctgactaacctgaaactggagggcagcagcggtaaagcgttgcgtcagtgtattgcggcggtcaggcgtggcggcattgttagcgtaccgggcgtctacgctggatttattcacggtttcctgtttggcgacgcctttgataaagggttgagctttaaaatgggacagacccacgttcacgcatggctgggagaattattaccgttaattgagaaaggattactgaaaccagaagaaattgttacccactatatgccgtttgaagaggccgcccggggatatgagattttcgaaaaacgtgaagaggagtgccgtaaggtgattctggtacccggtgcacaaagcgcagaggcggcgcagaaggcggttagtggtctggtgaatgcgatgccggggggaacaatatgatcgtcaggagtggttttcgaggtaaaggacagccatgacgataatcgccgccataatcagaaatcctatcaggatgtaaaatgcttctgccatggttattcccacaaacgaaacggaataattttgcagcaaaagtgaacagtgagaaccaggaaaaattgctgattttgcgtaaagaggatgcgagtgcatcctctgggcaaagcgagttatcgcttgtgcagatgggattaaagcaggtagtcgccagcagcttctggctggtattcgagttccagcacttcaaggtgggttgcaacgccgcccggaagttcccagtgaatggaatcgccaacgcgcagccccagcagtgcggcacctaccggagccataacggaaagctgagtattgctatcggtcatttttgccggatacaccagcgtgcgcacacgcacttcgccatcgctaagattgcggaatttaacccggctgttcattgtcaccacgtcgtgtggcatctcttctgggctacacatttgggcgcgatccaactctgcgtttaacgcgtcggcgattggcaaaccagcataggcgggttgctccagcagaatatcgatgcgttcggcatccaggtcgttaatgatgatagttggtctggacatttttactccatgtcgtcggtgctgcgagtgtcgcagataaacatacccaaaagaaaaccctcaccgtcaggcggcgagggtttaactcacatgatgatactgactgttgctcactctttgaagtgatttgcgtcacattcagggaattcctcaatgcagcgcattatgtataaatcttaatcgccttggtttatggaagacgaattagcgtgttttgtaaatcagatgattaataacccgctttatcaatcacaaaggttttgccacagttacctgggtgaggttgtggcaagaaactgtttgcagaaagcggagcgttgatggcgtcagctttgatgctgatctgaatttcagtcaaatacgcagggttaccctggcacgttagcttaactgctttcacgttctcttttccccagcttttggcaaaggcggcgtcaaagtcacggcggctcactgttttaccgtaattatccgcaaggaattttccggcttcgctctctttaatttcttgattcaggcgtaccatcgtaccgaagtatgcgtccggatcaaaaccaaagcaggcaccgtgtttggcatattcgtagcgttccaggcaggaacgtccgccagctcctggcatgacttcacttagtttagcggccgtttccagacttaatccggtttccgggctactacacattcggctggcgcgcgcttctggtagattcgggattgggcgagtagcgcaaccgaagcgcatccagcggcgttcatcaacaccacgggcagcaacgcttttaggcaatcctggccacagaccatgtacggtcagaaaatcagctttgttggtcgtttcggtttgcaggcgacattcatctcgttcgttacgatttcgatcgtgttgactctggcaaaatccggtttgccaggagagggccaggacatagcgatcaaaatcgccatactgttttgcctgcaacgctaaggcgttggcagaagagaagggaagcagagaaaccgcgagcaacgcggcgttacgccagaatgctttcataatgggtgtggaactcatacatacactgaatactatctattaaatcataaaaaagcccgccaggtgggcttacctggcgggcgtgatgatttattcagcgtttggcgaacgtattagttccacatggcgagaatcggccagccaaccaacagcaacatagagatgtaaatcaccccgaagattgcgccaagacgccagtaatctttacttttcacatagccacagccgtaaataatcaccccaggaccggttgcatacggcgtcagacagcccatgataccgatagacagcaccagcaggatacacagttgttccattggtacgcccggaatacctttaccgacggccagaataaccggcagcatggttgcggtgtgcgcagacaggctggcaaacaggtagtgtgcaaagtagaacaccagaaccagtacaatcaccgttgcgtttggactgaatccttccaggtgcgtactcatggtaccggcgaaccagtcaataaaaccagaacgagtcaggccgttagccatcacaaccagagttgccaggttgaccagtgtgttccatgcgctgttatagcgggtaatgtctttccaaggcacaacgtgcagggccagcattaggctaactgccagcagaccaaccgcagtagcattaatgacttcactgccaaatacccacaaacctaagctgagcaatacaaggccaatcagtgtccactctctgcgtgtcagcgcacccatggttttcagttcatcacccgcccaggttgccacttcttcactgtgtgtgatttccggtttgtacagcacgtaggaaagccacggcgcaatgataagcaagataaccccaaccggcaggaagcagaggaaccactgcaaccagctaatctggataccggcaattttgctgacgaactccagacccagcacgtttggtgccgcaccggtgacaaacatggagctactcagactggtactaatgaccatcatccacatcaaatagccgccaatacgacgcgcggacggatcgttcgggaaacttttaaacaacggcggcaggtttttaatgaccggaaaaaccgtacccccggtacgcgcggtgttggaaggtgtaaacggtgccagcagaatgtcgataatgacaatcgcataacccaacgtcagcgtgcgtttgcccatgaatttcaccaggaaaagggcaatgcgacgacctaacccggaaacttcataccctaatgcaaaaataaatgcgccaaataccagccataccgtggtgctggaaaaaccagccaggccccatttcagcgcctgtttttgcgcattaaacgctgggtcagctaattctttggcatcaaagagcaggtaattactgccaataacgcaaatagtaaccgcaataaaactgatcgctgttgccggaattggctcgaggatcatgccgacaatcattgccacaaacacagcgaagtaatgccatgcctgcggcggcataccgtcggggacagggataagaaacatgacacccatcaccaccagtggggccaatagtttccatatattatcttttgctaaagacatacgggttctccgaaaattaatatttccaaatttatcaagtgcttaaataattaaatctgtgctaaaaaccaggtaaggatcagtaggtcagcactgccgcctggactgagatttcgttcgatacactccctgtcgaactgccggagataatcgagatcggcgggggttcgaatgccccctttttgcaataatgtttgcgcctcgcgctgtagccagcgcaggcccccctcgccaccgcggcttgcaacgttggtatcgccgttgatcgccatcagtaggagcaaggtatcgagcaatgccagttcaggatctaacccctgatccagcagagtgaggtaatgcggcaaggcgtgattgatcaccagtggataacccgcttcggcttcaccgcgtgcgccggtaaggccaagctgttggtacaaccgttgacctgccgtcagttgactattattggtacgcagttcgcgatcggtcaggccacggcagaaacttgccgccgtagaacaaacggttgttggcgttaccggttggttgagttgaagcaaacggccaattgccgcacatagcagccctaaagaaaaaatgctgcctttatgcgtgtttacgcccgcagtggcgcggaacatatcaccttcgcaagccataccaattgggcgtaatccgtggagtaccgcttctggtgccatttccgcactacaggcaccaaattcaatgaaacggggtagccagccctgaatcgccagcgcgctgcggtggaaatcttccagcgccatatctttgtgcgcaccgcagttaatgcgatccacgaggcctggtttcggactcagattgacttcagtcagcatggcgcgccagcccagcagggcgtactcatcgattaaactcgtcgcaagctttgtggttttagtactcgttgcaggcatgctcatcgttcagcagtgcctccatgttatttagttgacgttgcaggcatcgacatcgttcagcagtgcctccatgcggttgagtaaatcggtcagttgatgggtttttccacgcgcgcagacggctgcgctttgttcgcacaacaggcagcggcgaggcggcagactatagtcgcggcgggagagaatttcgccttcgggcgtcaggacatcgatatcccataaccgcccgagaggatgactatgttcaagctcaatggtggcgagcttgaggtcgcgagccggggcggcaatgctcaacatgccctccggcccgctggcggaaaccagtgcagcctgctcctgaatttgccagccctgttttgcggctaaggcacgcaaggctgtcacgccatgattaaaaattcggcgtgtgacctcgctgtctttaatcggcccaggcgcaaccacggtaaaggagaccagtggaacaggatggcgcttgagccagacgtgttgccgtgcttgcctttcatcccggctgacgagcagctcgggaatacttaccgcatggtggctggcgagttcaggaagcaggtgcatggcttattccttcacctgatgcacaacatcgatcacgctgccatcgcggtaacgcacaacggcaacgacgcggtctgtgaattcaatcggctgtggttcaccggtcagcagacgcgcacgttcgcgcagccactcaatggaaaccactttaatgcccgcttcctgcagacgttctgccagttccggacgtgccgggttaactgcgataccgtggtctgtgaccagaatatcgacactggagcctggggtgatgcaggtcagtacgttatccaccagagtcggaatacgaccgcgtaccagcggcgcgacgatgatggaaagcgcagaggcaatcgcggtatcgcagtgaccaccggaagcaccacgcagtacgccgtcagagccggtcagcacgttaacgttgaactgggtgtcaatttccagcgcgctcagtaccaccacgtcgagacgatcaacgcttgcgcctttgctaccccagttagcgtactggttggcgctgatttcgatgtgattggggttacgggccaggctttgcgcagcatggctgtcaaagctctgcacatccagcagtttgcggatcagacctttttcgtgcaggtcaaccatcgtcgcggtaataccgccaagggcgaagtcggcgcgaatatcgcggctacgcattttgtcttccaggaaacgggttaccgccaggcttgcgccgccggtgccggtttgcatggagaaaccttctttgaagtagccagagttgacaatcacatccgcagcgctacgggcaataagcagttcgcgcgggttagtggtcatacgggtcgcgccagcgccgatttttgcagcatcgccaacgcggtcaactttgacgatcaaatcaacctgatcttgctcaatgcttgccggattatgcggataaggcagcagttcttcggtaagcatcacgacctgttttgcgttgtcggcatcaactattgcatagccgagggagccgcagcaggctttaccggtgtagccgttggcattaccgaattcatcacaggacgggacgccgaggaaagccacgtcgatattcagttcgccgctctgtaccagatgcacacgaccgccgtgagagtggatctgcaccggttctgccagcagaccacgggagatctcttccgccagtggaccacgcaggccggaggtataaatgcgggtaaccacgccctggcgaatgtgttctaccagcggcgcatggcaatcactcagggagctggacgccagggtcaggtttttaaagcccatcttcgcgatgacgtccatcaccatattgacggtcaggtcaccgccacggaaagcgtgatggaaggaaaccgtcatgccgtcctgtaaaccagagcgacgaatcgcttcttccaggttggcgcacagtttgcgatcgcgcgctttttcagcctggtaggtttgctttgggctgttctggaaagcggcaagatcgcattcagcgcgacgattccaggccgctacccgttcttgtcgttgagattgttcaattttctgcgtcattttgattgccttattcttcgcggatgccggaaagttctgcacgggagagcaccagacgggcgcgatcgataaccggaccgtccaccatcttgccgttcagggaaaccacgccgaggccttcgcgagcggcggcttcagcggcttctacgacgcggcgggcgtgatccacttctttctgggtcggtgcgtagaggttgtgcagcagatcaatctgacgcgggttgatcaggcttttgccgtcaaagcccagctgtttgatgtgggcggcttcttgcagaaatccggcttcgttgttagcgtcggaatagacggtatcgaacgcctgaatacccgcagagcgcgcggcctgcaaaatggaacagcgtgcgaacagcagttcagttccttccggggagcgttctgtacgcaggttgcgcacatagtcttctgcaccgagggcgataccgatcaaacgctcggaagcgtgagcgatttccactgcgcgggtaatccccagcggagattcaatcgccgccagcaggccggtgctgccgggttcacgaccacaggctttttcgatacgcaggatctctttttcaatatccagaacatcctgagcggtatcggttttcggcagacgcacaacgtccgcaccaccgcgaacgacggcttccaggtcgttaacaccccattcggaatccagcgcgttgacacgcacaatggtttcaatatcgcgatacagcggatgttgcagcgcgtggtaaaccatgcggcgggcggtgtctttttcacgcaatgctacggagtcttcgaggtcaaacatcagggcatcagccgggtagatgaaggagttgctgaccatcgcggcattggcaccaggcacaaacaacatgctgcggcgggtgcgagttttacgttgttgcaggctagcggaaatcattggcaatcctcccatggcagagccgggataccgctggcgcgtgccagcagggcttccagtcgtgcacgtaaaatgcagtacagtgcgcctttgtcatcgacattcagctgtacgccgcgcacgttgtagcgggcgagaacgtccagaatggtggtgcgaattgcatcgccaaactgtttctcaacgctgctattgatttgcaggtcgatatcctgcgtatcgagtggggcgatgcgtatcatcacatccccagactcaagggtgcctgcaacggcgggctggtttattttcatttttcacctgtttctcatgcgggggtcttttgacgagctgccgcgtcctggcgggagtgctcaagcaggttctgcaaataatgcagcgtgactgcagggaccagcggcgcgatagccgtgagatcgtttttcgccagcagttgacgtacccgggaagcggatatcggcatctcctggtaacgcagccgctcaatttcaaccagttcgatgggcggtgcggagatagtcggcgtttccagccagtagcgcatatcctggttgtactgggcggtaacgcgacaaaagggttcagtaccgacaaagcggtgagttacacccagcgcgggagcgaggtactgacggaaaatcttcagatcaatttcggtgtaacaatggttaatgacgctctgttctttaatgaagtagcaagggaacgtagcgcgggagatgatgtattcggagccacgatgcacagtcaggcgtggaatatcggcggtgccttttaacaccaaatccagccggtcttcataggggaagcgactagaatcttctttgactaaaaacagatgcaaccagtcgcactgtgccgcagcctgttgaatcagataacggtgaccattcgtaaagggattggcgttcatcacaatgcagccaatcttgttccctggatgacgaaattttttcaggctttcggcatagcgtttcagtcgcgtggcgctgttttccatcagcaccatcacgccgggtacgctggtcagcgtggaaaaaccgcactggcggaacagcgcctcgtattcggttttggtataaataaacagatgcgtgctgtgccgctcataggcgaggtttatcaattcagtggctaatgtcagcgccagtccttcaccgcggacggattcactgatagcaacgcatttaataatatttccggcaattccaccgcacgcgataagcttttcatcgcgggttacggtaataaatacttcgactgtggtgtcaacgctcaaatcattttcatgcaggaattgggcgatttccgccatttttttattttcactacgttttacgcgggtgaaaatatcattgccgaacataataaatagtatcctgaaggtgcatgttgttatcgatttgcaacgaatgttgttcaatgttgcaaactgataaccttttattttcacttgggagaaagggggtgatcgaggtatatctttttctcctttcgctatacatcctaaggagtatttcggcgtgaaattttgatttatttcacatagagttagtggttttttatttatttaatgattttaagttttttaattaatgtaattacgaaatgactcgcaggtttaagtgatttaattgatttaatgaataaaatttgccacgatcataattaatatctatgtattttgattcaacattttaattacatccgtcaaagaggctcgggacaacccgcaaggaaaacaatgttgcagcttaacgagaataaacagtttgcatttttccaaagactggcatttccgctgcgtatctttttgctgattctggtgttcagtatatttgtcattgcagccctggcgcaatattttacggccagttttgaggactatttaacgcttcatgtacgcgacatggcaatgaatcaggcgaaaattattgcctccaatgacagtgtcatctctgcggtgaaaacgcgtgactacaaacggctggcgaccatcgctaacaaattacaaagagataccgattttgattatgtggtgattggggaccggcacagcatccgcctttaccatcctaatccggagaaaattggttatcctatgcagttcaccaaacagggcgcgctggagaaaggggagagctacttcattaccgggaaagggagtatggggatggcgatgcgcgccaaaacgccaatctttgatgacgatggaaaagtcatcggcgtggtgagcattggctacctggtgagtaaaatcgatagctggcgggctgagtttttattaccgatggcaggtgtgtttgtcgtgctgttagggattctgatgttgctgagctggttcctggccgcgcatatccgtcggcagatgatgggcatggagccaaagcaaatcgcacgcgtggtccgtcagcaagaggcgctgtttagtagcgtttatgaagggctgattgcggtggatccgcatggttacattaccgccatcaatcgtaacgcaagaaagatgctggggctgagttcccccggacggcaatggttgggtaaacccattgttgaagtggtcaggcccgccgatttctttaccgaacagattgatgaaaaacgtcaggatgtggtggcgaactttaacggtctgagcgttattgccaaccgggaagctattcgtagtggtgatgatttgctgggggccattatcagctttcgtagtaaagacgaaatttccaccctcaatgcgcaactgacgcaaataaaacaatacgttgagagccttcgtacattgcgacacgagcatctcaattggatgagcacgctcaatggtctgttgcagatgaaagagtatgatcgcgtgctggcgatggtgcagggggagtctcaggcccagcaacagcttattgacagcctgcgcgaggcgtttgccgatcgccaggtggcggggctgctttttggtaaagtgcagcgcgcccgggaactggggctaaaaatgatcattgtccccggtagccagcttagccaactgccgccaggactggatagcaccgagtttgcagccattgtgggcaatttacttgataacgccttcgaagccagcctgcgtagcgatgaaggaaacaagatcgttgaattattcctcagcgatgaaggcgatgatgtggtgattgaagtcgccgatcagggctgcggcgttccagagtctctacgagacaaaatatttgagcagggggtcagtacgcgtgctgacgagcccggtgaacatggcattgggttgtacttgattgccagctacgtaacgcgctgcggtggtgttatcactctcgaagataatgatccctgcggtaccttatttagtatctatattccgaaagtgaaacctaatgacagctccattaaccctattgatcgttgaggacgaaacgccgctggcagagatgcatgcggaatatattcgtcacattcccggattcagtcagatattactggcgggaaatctggcgcaggcccgaatgatgatcgagcgttttaagccggggctaatcttgctcgataactatcttcctgacggtagagggattaatttactgcatgaactggtgcaggcgcattatcccggcgacgtggtgtttaccactgcagccagcgatatggaaacggtgtctgaagccgtacgttgtggtgtatttgattatctcattaagcccattgcctatgaacggctggggcaaacgctaacccgtttccgccagcgtaaacatatgctggaaagtattgatagcgccagccagaagcaaattgatgagatgtttaatgcttatgctcgcggtgaacctaaggacgagctaccgaccggcattgaccccttgacgctaaacgcggtgcgaaaactgtttaaagagcctggtgtgcaacatacggcagaaacggtggcgcaggcactgaccatcagccgcaccactgccaggcgttatcttgaatattgcgccagccgccatctgattattgctgaaattgttcacggcaaagttggcagaccacaacgcatataccacagtgggtgacatgataaagccggaggaaacttgcctccggcattactatttacttgcctgtgaccgctgctgccgttcctggcaccatcagctctgtagcaacgataacaatcaccaaaccaacaagcaccggtacgctggtgcgttttacgacttcaaacgggctgatcttcgccatcccggcaaccgcaacgactacgccagaaacggggctaagggtacggccaaggttactcgcctgcagcatcgggatagtcaaatacgccgggttaatgccggaagagtgcgccagtttcgggatcatctcaacaaacgcataaaacggcgcattgccactaccggtcgtgactgccgccagcattgtcagaatcaccaataccagcatcaggatgatactcgcgctaccaaagctggtagcgatagaaatcagactttgaataaagccgatggtgctaagcccctgagcgaataccccagcggcaaccagcagcatcaccacgttagcaaacgcatctgccatcccgcgataagccacttccagaccagagaaaactttctgggtattaaagctgcggaggaactccagaatggaggcaatcagcatacaaatcaccagaatagtgatgatgtgtaattgcggaccccatttaccgtcaaaaatcagtacaccgatgatcggcgtgaacggcaaaatggcataaaacgcaggagcagtggtggtgatttcactgacatctaacatttcatgagagatgtgctcttttttatccagataacgttgccagaagaagtgggcgatcgccatgccgataattgcagcaatactgataggcagcgtcgttttgaaggcgaagtcaatcaggctcatttcggaagcttgcgccgccagcaccacatccccactagtcggtgcgagaataatcgccgccggggaggcacaaatggcagcagctgcgccacgactgataccaacgtttaccatcaccggaaatagggttgccatcagcaaaacacccagaccggttgcggaagagacggccagagacatcagacaggcgacaaaataggcggcaatcatcagcaggtaaggggagttaatatactgcaatggtttactcgccagcttgaccaccatatcattcgcgccgatatgggtcatgtaagcggcaaatccacacagcatcataatcatcatgccgaggtcgccgccgcggctcattagtaatattttaacgtattcaacgatatccgtggcgctgtagcctgtactagcctggctggacggtaacactttgtgccccataatggcactgataatcagcaataacaggccaccgacaaataacacaccagtggcggaataccctttaatgatgtagcgagctacacccacaataaccacaaccccaataaggagctcaatgaatgtcagcataatttttcctgtctccaggccccaaagtaaataataaaaaattcctaaagcttaaggaaaaaatatgcccaataaattggcgatgaatgctgattaaaatcaagaaaaactgccattaagacattgaagttgctgtttttatacatagataacaaaacgcatatttagcggttggcaattatcacataataatgtgtgcaaattgatggtggattgatgcaaatttgttaattgcaatggtgttagctgcggctgtgcgctcaaaaaataatctaatatgagcataggttgacgatatatattatatacttcgttaagatgattgttgtatctcgttaaaaaataaaataatttttccttgattgcattttgtcatcaaaaaagacttggtttttcttttttgactattcccatcgcagaaaacgacgcatcatctttaatcgatgcgcggaaatatttaacttgaacaagcggaaataaatagagcagctattcagattattctttatgttgggtctattaaggttatgttaattgtagctttgctatgctagtagtagatttttgataaatgttttatggtcacaaatgaacgtgagtaaatatgtcgctatcttttcctttgtttttattcagttaatcagcgttggtaaagtttttgctaacgcagatgagtggatgacaacgtttagagaaaatattgcacaaacctggcaacagcctgaacattatgatttatatattcctgccatcacctggcatgcacgtttcgcttacgacaaagaaaaaaccgatcgctataacgagcgaccgtggggtggcggttttggcctgagccgttgggatgaaaaaggaaactggcatggcctgtatgccatggcatttaaggacagctggaacaaatgggaaccgattgccggatacggatgggaaagtacctggcgaccgctggcggatgaaaattttcatttaggtctgggattcaccgctggcgtaacggcacgcgataactggaattacatccctctcccggttctactgccattggcctccgtgggttatggcccagtgacttttcagatgacctacattccgggtacctacaacaatggcaatgtgtactttgcctggatgcgctttcagttttgagacaaatgaagttttagtaacttctttaaaatcaatagctaaaataagtaacatcaaaaataacgcgacttttatcactttttagtaaagttacactggacaaagcgtaccacaattggtgtactggtaaccgacacagcatttgtgtctatttttcatgtaaaggtaattttgatgtctaagattaaaggtaacgttaagtggtttaatgagtccaaaggattcggtttcattactccggaagacggcagcaaagacgtgttcgtacacttctctgcaatccagactaatggttttaaaactcttgctgaaggtcagcgcgtagagttcgaaatcactaacggtgccaaaggcccttctgctgcaaacgtaatcgctctgtaagatacgtcagcaagaattcaaaacccgcttaatcagcgggttttttttggtctttagtgtgcggtactggcgctaaacagccagaatgccagtgcggtcatggcaaaagaccccagaaggttgacgaaaacgttcagtaatgcccagccaaagcggccctcttgtaacaaaaacaccacttctgcgctaaatgtactgaaggttgttagaccgccacaaaatccggtggtgattaatactttccacactggatcaatgttcgtcatcctgctgaaccatgcgaatcctattcctatgatgaatgccccaatcaggtttgctgtcagcgtccccaacggaatcgcctgatgcagtgggttaaatcgcatacttaacagccatctcgccacgcttcccgtaccaccgccaataaaaactgctaaaagaagttgtaacactgcaaaatcctgctatttgatttgtatgagtgataagtgtaacgccgaataatcgtcgttggcgaattttacgactctgacaggaggtggcaatgctggttgccgcaggacagtttgctgttacatctgtgtgggaaaagaacgctgagatttgtgccagcttgatggcgcaggcggcggaaaacgacgcaagcctgtttgccctgccggaagcattgctggcgcgcgatgatcatgatgcagatctaagcgttaaaagtgcacagctgctggaaggcgaattcctcggactttacggcgagaaagtaaacgtaacatgatgacgacaattctgacgattcatgttcctagtacgccggggcgcgcatggaatatgctggtggcacttcaggcaggaaacatcgtcgcccgttatgccaaactgcatctctatgatgcatttgccattcaggaaagtcgccgtgttgatgctggtaatgaaatcgctccgttactggaggtggaagggatgaaggtcggtctgatgacctgttatgacttacgctttccagagctggcgctggcacaggcattacagggagctgaaatcctggtacttcctgccgcctgggttcgcgggccgctcaaagagcatcactggagtacgttgcttgccgctcgtgcgctggataccacctgttatatggtggcggcgggggagtgcgggaacaaaaatatcggtcaaagccggattatagatccctttggcgtcaccattgcggcagcgagtgaaatgcctgcactcattatggcggaagtgacgcccgaacgtgtgcgtcaggtgcgcgcgcaactgcccgtcttaaacaaccgtcgctttgcgccgccgcaattattatgatgtttttttactcggcgcttgattcaccttgttacagattgctattgtgtgcgcgcgtcgaatgaccgttaatattctctggtttttaaggcgcgttctgttgccggttatatgtcaagaaggtatctatgggtgagattagtattaccaaactgctggtagttgcggcgctggtcgttctgctgtttgggactaagaagttacgtacgctgggcggagaccttggagcggccattaaagggttcaagaaggcgatgaatgatgacgatgctgcggcgaaaaaaggcgcagacgttgatcttcaggctgaaaagctctctcataaagagtgacgtggcgagcaggacgctccctcaatatcttgttcgatacaaaaaacccgcttcaaaaagcgggttttttatcagacagatgtaagtaattattacaggattacttaacttccatccctttcgcctgcaaatcggcgtggtaagaagagcggacaaacggaccgcatgcagcatgggtaaagcccatcgccagcgcttcggctttcatttcgtcgaactcatccgggctaacgtaacgttgaaccggcaggtgatggcggcttggctgcaaatattgccccagcgttaacatcgtcacaccatgacggcgcaggtcgcgcattacctcaataatttcttcattggtttcacccagtcccaccatcagaccagacttggtcgggatttccggatgcgcttctttaaagcgttccagcagcttcaggctccagttgtaatctgcaccaggccgtacctgacggtaaatacgcggtacgttttccaggttatggttgaacacatctggtggcgttgcagtcagaatatccagagcacgatccatacgaccgcggaaatccggcaccagagtttcaattttgatttgcgggcttttttcccgaatggcagtaatgcaatccgcaaagtgctgggcaccgccatcgcgcaggtcatcacggtcaacggaggtgataaccacataacgcagcgccatatcggcaatggtctgcgccagtttcactggttcattggcatcaggagctaccgggcgaccgtgggcaacatcacagaacggacaacggcgggtacaaatagcgccgaggatcataaacgttgctgtgccgtggttgaagcattccgccaggttagggcaggaggcttcctcgcagacagaatgcaggccatttttgcgcattgcggctttgatgccctggatacgtgtagagtccgctggaagcttgattttcatccattccggcttgcgcagcagggcttcgcgctctgttgccacgtttttaaccgggataagggccatcttatcggcatcgcggtatttaacaccgcgttccatcacaatgggtttactcatagcgtgcgtgttccagttgcgaattacgaaggaaagcgtttcaattcaatagattgttgtaattatcaactatttttgaattaacgactggcagtatatcattgaaacggacctgaaagcagccaaagcggtcgcgaaaatgtaaaattgttgttggattgtgccattttatcgttctgcgctgtgatctggctgtaacaatactttttcaaaatgcattacggataacatctattactccgtgcaggatgggatcacgcaggctgaatttgttgtagtggatagagaaatctatttgctcctcatttaaggacggaaaaggcagtttttccagcggccagcagcggctaaacaggttataaaaacggctgggaataatcgctaacatgtcactgttggcaaccagtgcagcgattgtcaaaatgttgtagctggtgaaattgatttgccggtccggaaacatttcttgaactctctgccgcagaccgctgaaattttgctcttccggtaacagaagtacatgcgcagcgttgtcgatagtctctctgtcatcttctaaagagagtagtggatttccctcgcggcaaattaacaccatattgtcggtgaacagaacatgatgttgcaccgtacgattggtgcaaaacatgttatcgatgatgagatcggtttgaaactgactgagttggttttccgcgtcgctgatgggcgggttgcgcagtaaaagctgcggatagtgagttttaatcgcccgatagatgacaggaaggaccagtgctccgacgctgggagtggtcgcaatagttatcgttcgttgcttatcatagcttccttcgatatccagcgcgccaagaatggactcaaggccctgactgatatactcatgtagatgcatcgcaaatgcggtaggagtgacaccctggcctttgcgaataaacaatgggtcagggaatataacgcgcagtttctgaatagactgactgattgcgctgggggtcagattaagcactttcgctgcattaacgatccctttatgtacatatacagcttcaaaaatagtcagaaggttaagatcaatatttcgtaaggttgtaaatatttgtggtttaccttcactgctctttctgcttaaacagggttcaatttgattattactatccacgcacttactccaattttattcatggaaaaataatatttaaaaaattacaataatcttatgtctaattggaacggaacgcttttgctcaccataatcaactatttcaataggttaatcaatggggtgagttacggagcaaggcgtggcaccgcatttctgcaagtgataaagaaaatatacaaacgcgaaggagatgtaaagcattagcagatattatgagtaatgacccagtgtaaattgggccattgatgtatggaattaagcggtaatatattcgaagtccggattgtttagtagcgctaaaatattttccagtaaacgtggagcaatattattagtcgtcgcttcgggtttccattgacttattttagccatttccattccggcatacccacaaggattaatacgtaaaaatggactaagatccatattgacgtttaatgccagaccgtggaaactacaaccgcgtcgaatacgtaaacccagactgcaaattttcttttccccaacatagacacctggcgcgtcagcccgaggatgcgcttctatacccagttcagccagggtattcaccactgtttgctcaagcaaggtcaccagttcacgcacaccgagtttacggcgtttcaggttaagcaacacatacatcacctgttgccccggcccgtgataagtcacctgcccaccgcgatcgctctggatcaccggaatatcacccggcattaaaatgtgctccgcttttcctgcctgaccttgggtgaataccggatagtgctcgaccagccagatttcatcaagggtactatcatcgcgggtatcggtgaattcatgcatagcctgggagattggctcgtaaggctgaagaccgagctggcggacaagaattttatcctgatacaaaacggcatctccgtggagaatgagtaaaagtgggggaaaagtatatcacagcgaggagaggggagttacccgaccaggagccgggtaacggagaagcgagttacagaaccatgcggacaatatcgattttgcccagttcttcatacagtgtttcaacctgctcgatatgagtggcgttgatagtgatagatacgctgtggtagttgcctttgctgcttggttttaccgttggggtgtagtcacctggcgcatggcgctgtaccacttcaaccacctgatcaaccagctcaggtaacgcctgccccataactttgtaagtaaaaggagtagggaattcaagcagttcgttaagtttggttttcatgtcagctccggcgtaacgtaattaaatagcaactcccgccagaaggcgggagttttttactgatgcttagtatatggggacggaaattacactttcaagtgtttaatttttaaccaaaccagtgatggaacattaatttaatgtaatcaatgattttgccgaagaagttaccttccgggatttcttgcaacacaaccagcgggcgttgctcgatcgttttgccatcaagctggaagttgatagttccgacgacctgattcttttgcagcggcgcatgcaattcactgctgttcagcacatagctggctttcagatctttcatgcgaccacgcggaatggtcaggtacacgtctttatcaacccctaagctagcgcgatcagaatcaccaaaccaaaccggttcagaggcgaactctttacctactttcagtgggttaacggtttcaaagaaacggaagccccaggttagcagttttttactttcggcttcacggcctttaaaagtacgtccgcccattaccgcagaaatcaagcgcatctggccttcagtcgcagaagcaacaaggttgtaacctgctttgtcagtgtgtccggttttgatgccgtcgacattcaggctgttatcccataacaggccgttacggttcagctggcgaataccgttaaacgtaaattctttttctttatagatgctgtattcattcggtacgtcacggatcaatgcctggccgatcagcgccatatctcgcgcggagctgtactgaccatcagcatccagaccatgtaccgtctggaagtgggtatttttcaggcccagtgcgttaacgtagctgttcatcaagccaacaaaagcgtcctggctaccagcggcaaaatcggccatggcgacacaagcatcgttaccgctttgcaggttaataccgcggatcagctgagaaaccggaacctgcatgcccggtttgaggaacatcaggctagaacctttaaacaccgggttaccggtggcccatgcgtcgttgccgatagtgactaaatcagtttctttaaatttaccggctttcattgcctggccgataacgtaactggtcatcattttggtcaggctggcaggatcgcggcggacatctgcgttctgttcggcgagcactttgccggagttatagtcaatcaggatgtaggactccgcatcgatctgcggtacacccgggatcatagttttgatattcaggtcatcggcatgtgcagcagagataaaggctgtgcaaagagccgtggtgagcgccaggcgcttcatgatacgagcggaaaaaatggtattcatggtctgaactacgacatccgtgatggaattaaaaaagtgccctactatagcaaatgcactaccggcaggcatctgactttccgcgtgactttgttaacgtcatttacagaaattgacacatcagatgcctgctttacgttactgcgcggtagtaataaaactctgtaattgggcttcggtttgcaaacgttgctgcaaggtactggcttcggctttgctggcgaatgggccaagctggatccgccagaccgcgccattttgagttacgcgaccggggacgccgaacttctgtcccagttgctgttggtactgttgcgcacgagcctgatcgcttacggccccgacttgcaccataaagttgccgctggcgctttggctgacggcttgcggtgtcaccattgcagggctggttgcaggcgttgtgctcggagctgtaacaacgggctgtggcgcaggcgtcggttcgctgccttccagtacaccaggcgctaaggtcgttggtgcgccgaggaaaccgctactggttaccggcgcgccggtcggatcttcgctttttagcgtgctattactgaccggaagaatgtcaccctgcgggccagacacactacttgttcccgcgccaccgcttaaatcgggaggtgcaggcagggcgtaagtctgtttggcgactgtggtacaagccataccaggaccagaaaggctaccatcctgggcaacaataatcggatcgatacgaactttggtgttgttactcgtgttaagacggtcagctgccgcgcgagaaagactaataacgcggtcgttgccgtaagggccgcgatcattaatgcgcaccacgatcattcgcccgttagccaggttagtgattctggcgtagctggggatcggaagcgttggatgggctgccgtcagctgtgtcggatcgaatgcttcgccagaggccgtcaggttactgccgggttcggcatcatagattgccgccagtcccgcctggctaaatcgagacggatcctgcacgattttgtagcttttaccgtcgcgctggtaatcctgatttgccgtcgcgttcagtggttcgaaacgcgggtccgccccgctaatttcaactatagggccgttacataccgcaggctgcggtacacttaccgtctgttgctgaccatcatcgcttgtacatgccgcgagcattcctgccgcgatgcagatcccgagccactgcttacgcattgcgcacctcttacacgcttttgctcaacattttcctgtgggtgtggatactcattacaatcccgaacccagccatcagcacaattagcgcgcttcctccataactgaccagtgggagcggaacccctacaaccggcagaataccgcttaccataccaatatttacgaagacataaacgaataatatcagcattaagccgccagccatgacgcgaccaaaggtggtttgcgctctggcggctatccacagcccgcgcatgatcagcagaatgtagagagcgagcagaatcagaatgcccactaatcccagctcttccgccagtaccgcgaagataaagtcagtatggcgttcggggagaaattcaagctgactctgagtgccgtgcagccagcctttgccgcgtaatccgccggagccaatagcaattttagactgaataatgtgatagcccgcgccgagtgggtcactttccgggtccaggagcatcattacgcgctggcgctggtaatcatgcatcaggaagaaccacagaatcggaatgaacgccgctaccagcactactgcgacgccaatcagacgccagctaaggccagagaggaacagtacaaacagaccggaaagcgcaacgaggatacttgttcccaggtcaggctgtgcagccaccagcagcgtgggcataaatatcagcaccagcgcgatgccagtgttcttcaagcttggcgggcaaacgtcgcggttgataaagcgcgcaaccatcagtggtacggctattttggcaatttcgctcggctgaaaacgaacaataccgaggtccagccagcgttgagcacctttagagatggcaccgaaagcatctaccgccaccagcaaaataatacagatgatatagagatagggggcccagccttcataaacgcgtggaggaatttgcgccatcaccaccatgatgaccagacccatcgcgatttggccgattttacgctccatcatgccaatatcctgaccgctggcgctccagataaccagggcgctgtaaaccagcaatgccagtaagatcagcagcattgtgggatcgagatggactttatcccagaatgtttttttattcggattatccgtcatgattaatggtcctccgctgcggcaaccgctggattttccgcaggcagatcggtgttgttatcacccagcataatgtggtcgaggatctggcgcatcagtgtaccaaccgccggacccgcaccaccgttctccagaatcatggcgacagccacttgcggattgttgtatggcgcaaaggcggtcatcagtttgtggtcacgtaaacgctcggcaattttgtgcgcattataggtttcgttcgctttcagaccgaagacctgagcggtaccggatttcgccgcaattttgtacggtgcgctagcaaagtatttatgcgccgtaccgttagggcggttagcaacaccgtacataccgtctttcgccagctcccagtaaccggaatgaatatcgccgacgggcggttcatgcggctgtacccatggcacctgtttgccgtcttcggcggtgctcatcagcaaatgaggaaccttcacgataccgtcattaatcaggatcatcagtgccttactcatctggattggggtcgctgtccagtaaccctgaccgataccaaccggaatggtgtcaccctgataccacggttttttaaagcgtttctgtttccattcgcgggtaggcatgttgccggaacgttcttccgccaggtcgataccggtgtaatgaccataaccgaatttacccatccattcggagaggcgatcgatccccatatcgtaggccacctgatagaagaaggtatccgcagattcttccaggcttcttgtgacattcagacgcccgtggccccattttttccagtcacgataacgtttttcgctacctggcagttgccaccagcctgggtcaaacagcgtcgtattgcgcgtgatcaccccggcgctcaatgcgctaaccgccacatagggtttaactgtagacgcgggaggataaaccccctgtgtggcgcggttcaccagcggtgtattcggatcgttcaacaaggcggaataatctttgctggagataccgtcaacaaacaagtttgggtcataactaggcgtggaaaccagcgccagcaccccacctgtacgcggatcggtgactaccacagctgcgcggctacccgccagcagcgtttcaatatattgctggagtttgagatccagcgtcaggtaaatatcgtgtccggcttgcggtggtacttcttttaactggcgaataacacgcccacggttgttaacttcaacctcttcataaccggtctgaccgtgcagcacatcttcatagtaacgctcaatgcccagcttaccgatatcatgcgttgccgcatagttggccagtttgccgtcattattcaggcgttcgacgtctttatcgttgattttgctcacatagccgatgacgtgggtcaacgcgctaccgtaaggatagtaacgacgtttatagcctttaacttcgacacccggaaaacggtactgattgacggcaaagcgagctacttgtacttcggtcaggttagttttcaccggaatagaggtgaaacggtgactacgtgcgcgctcttttcggaatgcagcaatatcgtcatcggtcagatctaccacgctgcgcaaagcgtccagcgtttgctgcacgttatcgactttctccggcatcatttctatctggtagatagtgcggttgagggccagagggataccgttacgatcgtagataatgccgcggctgggcgcgataggcaccagcttaatgcggttttcattagagcgggtctggtagtcggtaaagcgaacaatttgcagattatacaggttggcgataagcacgccggtcagcagcaaaatccccaaaaaggcgaccagcgcccggcgcacaaacagcgcggactctgccgtatagtcgcgaaaagagttctgtagtttcatccgctgcgttttctactcaaagctcccttatcactcacggtgataaggatggttggtggtgatgctccacgcccggtacagactctctgcgaccagcacgcgaaccagcggatgggggagggtaagcgcgctcaggctccagctctgctcagccgccgctttacaggcagggctcaacccttcaggcccgccaatcagtagactgacgtcgcgaccatccagcttccagcgttccagctcagcggctaactgcggcgtatcccagggcttgcctggaatatcgagggtgacaatgcggtttttgcctgcggccgccaacatctgctcaccctctttgtcgagtatgcgcttgatgtccgcattcttgccgcgttttccggccggaatttcaatcagctcgaagggcatatctttcggaaaacgacgcaggtactcggtaaaaccggtttgtacccagtccggcattttcgttcccacggcgacaagttgcagcttcacgcattaactccagagtttttccagttcatacaggcgacggctctcttcctgcatgacatggacaatcacatcgcccaaatccacgacaatccagtcggcgctgttttcaccttctacgccgagcggtaacaggcccgctgcgcgagactcctgcacaacgtggtcagcaatggacataacatgacggctggacgtacccgtacagatgatcatgcagtcggtgatgctggatttgccctgaacgtctaaggcgatgatgtcctgacctttgaggtcatcaattttgtcgataacaaaatcctggagtgctttaccctgcaagttttccccctgggtgaatcaaatagataaaaatggtctgtcagtatacctgaaccagaggcgatttcgggacaattgtcgccgaatcggctttcgaaagtgggctatcatcccaccccgcgccgcagattgcatcgccatttttgtaaaacaatttctacaaagtcgtgtctggcggaaaaagtctggctgcggagaatatcagcctgcccgggtctgtcaatggtcgttgcggcttacccgtaaaaaaacagaaaagtcatgcattctcgaccccgatggcacggctattgaggacgcgtagcgtcgcgaatttttggttgatatcaatggcgctccaacacccctggtcaacgcgaaaatgccacatagcttcggcaggcatgccaattaaacgggcgattaacagactcagtacaccctgatggctgacgactaaaatattctgatagtgctgaaattcactaagccttgcgataaagcgttccacacgttggctaaatgcctgaaatccttcaccgttcgtggggattgcatgctgccagtcattgcaccacgcgctatagttttcggcatcttcttgcatgaggtcgcgatgatgtcgcatctcccagtcgccaaaaaacatttcgttgagttcaggtatgatttgcacggggagctggcggtcactgagaaccagtcgcgcggtatgctgtgcccgttccagttcactgcataaaaccagatcaaaggaaacaccatgtagcagcgtatgcagattttgcgcttgctcaataccgcgcgcggtcaggggggtgggcgcatgaccgctgtaaagaccatcgatattcgcttgcgtttcaccatgacgaattaaccacagtcgcatcatgccctccgtaacgacaggtatcagcgatacaagccttgttggttaatgtaagtcagtaccggttccggcaataaatcctcacaactttcaccgttttgcaaacgttcgcggatgatggtcgcgctgatgttaaaccacggcgtttcagccagataaattttaccggcaggctgaaggtgaagatcttccgggttatgtgtcaaatgatcttccagccattgctggtattgcggttgcgccatttcaagtgggtaacctggacgccgacagacgatcaaatgtgcattgtcgagtatcgtttcgtattcgtaccaggtcggaaaggtcagcagactatcctgaccaataataaacgccagcggcacgtccggtccttgttcctgccgccactctttcagtgtttgcgcagtgtaagagggggcattgcgctttagctcgcgttcatcaagagtaaataatggcttgtcggcaatcgccagttcaagcatgtgtttacgctgcacgctgttcgcttccggctggggacgatgcggaggaacattattagggatgattgtgacccgcgtcagaccaatcaaattcgccagcgtttccacgggttttagatgaccatagtgcaccggatcaaaggtgccgccaaacagagcctgtaaagatttcatatcaaccgtcgataaatacgtccgccaggggtttatggcacaacagaagagataacccttccagctctgcccacacactctgaccgtaatcttgtttgagggtgagttccgttcgtgtcaggagttgcacggcctgacgtaactgcgtctgacttaagcgatttaacgcctcgcccatcatgccccggcggttctgccatacccgatgcttatcaaacaacgcacgcagtggcgtatgggcagactggcgtttcaggttaaccagtaacaacagttcacgttgtaatgtgcgcaacaaaataaccggttcgctgccttccagacgcagttgctgaagaatatgcaatgcgcgcttactttttcccatcaacaaagcatcaacccaatgaaaaggggtgaaatgcgcggcatcattcaccgcctgttcaacgcgcggtaatgtcaatttgccgtctggccagagcaggcttaaacgctccagtgcctgagccagcgccagcaggttaccttcataacagtagcagagcacctgatttgccgcgtcatccagttctaagttgagctgttttgcgcgcgcagcaacccagcggggaagctgagcctgctccggtgtctgacaggtcacctgcacgctgcgattcgcaagcgcagtaaaccaggcggcattttcttgcgctttgcttaatttattaccgcggacgatcaacagcaggtcgtcatgcagaagtccggtgagtgtgagaagttgctcattgatcgccgcattcggtccgttttctggtaacaacagcaatagcgtttgtcgactggcaaacagactcatagcctggcataagctaaagatcgcattccagtcagtgttgggatcaatggaaaaagtgtggtgttcttcgaatccttgtgccgcagctacctgacgaacagcgtcctggctttcctgcaataacagaggatcgttaccaagtaaaagatacgccgcgcgcagcccttcattgagctgcgcgcggagttgttccgggtacaaccgaatcatcagttacccagcgtggtggagacgcgtgcaggcgttgccggagtatccgttgtggtgctcgtctgttcttcgtcggaacgaatatccgcagcacggatgcttggcagcttacgaatcagctgttcggcagcacggtcgtacatctcttttacgatcatgtcttgttcgttatctttcgctaacgccatttgcgggttatcgaagaagctacggaagactttggcgctaatcgggtagatatcacggccggggatcaacacggtcgcattaaccgtcatgatcatctgatactctgctgtttgaccgttacggaatacgcttgcggtatctttcgcgatgctcactttacccaaacgcaaggatggaacgtccttacgcgtggtttctttatcaagcaactcgacaccattcagacgtaactggttacgcaccgcacggcttaatggcccgttcggatcgccactgtccaggatcatgaccttcatagtggaaggaacctgcgtggtatcacgcagatgccagccacacccggcggtgattaacaccgccagagataacaacaatgttgccagatatcgcacgcttcctcccgcgcttagccaacgaccagattgaggagtttacctggtacgtaaatcactttacgtacagtaacgccatcaagatattttgctaccagatgttcctggccagcacgttcgcgaacctgttcttccgttgcgtccaccggaacggtgattttggcacggactttaccgttaacctgcaccacgaccagcgtggagtcttccaccatcgctttttcgtcagcaaccggccacggcgcgttgtcgatatcgccttcgcctttcagttcctgccacagcgtgaagcagatgtgcggggtgaacgggttaagcatacggacaacggccagcagtgcttcctgcatcagagcgcgatcctgctcgccatcggttggtgctttcgccagtttgttcatcagctccataatcgccgcaattgcggtgttgaaggtctgacgacggccgatatcatcggtcactttagcgatcgttttatgcacatcgcgacgcagcgctttctgattttcagtcagcgcatcaacgttcagtgccgcaacatcaccttttgctgtgtgctcgtaaaccagtttccagacacgtttcaggaagcggttagccccttccacaccggattcctgccattcgagagtcatatcagccggagaagcaaacatcataaacagacgaacggtgtccgcgccgtaacgttcaaccatcacctgcgggtcgataccgttgttcttgctcttggacattttgctcatgccggtataaaccagttcatggcctgccgcatctttcgctttcacgatacggcctttctcgtcacgttcaacgatagcatcaaccggggaaacccagttacgttcgccgttttcgccaacatagtagaaggcatctgccagcaccataccctgacacagcaactgtttcgctggttcgtcagagttcaccatgcctgcatcacgcatcagtttgtggaagaagcggaagtagagcaggtgcataatggcgtgttcaataccaccaatgtagatatccaccggcagccagtagttagccgcttcggaatccagcataccttctttgtactgcgggcaagtgtagcgcgcatagtaccaggaggactccataaaggtgtcgaaagtgtcggtttcacgcagtgctggcataccgttaacggtagttttcgcccactccggatctgctttaatcgggctggtaatgccgtccattaccacatcttccggcaggatcaccggcagctggtcgtccggggtcggcattacggtaccgtcttccagcgtcaccatcggaatcggcgcgccccagtaacgctgacgggaaacaccccagtcgcgcaggcggtagttcactttacgctcgccaacgcccatcgcagtcagtttatcggcgatggcgttgaaggccgcttcatggtcaagaccgttgaactcgccagagttgaacagcacgcctttttcagtcagggcttgctgagaaagatctggctcagagccgtcagctgccaggataaccggtttgatgttcaggccgtatttagaggcaaactcgtagtcgcgctggtcgtgccccggtaccgccataactgcgcccgtgccgtactccatcaatacgaagtttgctgcccaaacgggaatttcttcgcccgttaatgggtgaaccgctttaaagccagtatcgacgccttttttctccatcgtcgccatttcagcttcggcaactttggtgttacggcattcgtcaataaaggccgccagttcaggattattttccgccgctttctgcgccagcggatgacccgcagctaccgccaggtaggtacaacccataaaggtgtccgggcgggtagtgtaaacggtcagcgtgttgtcatagtcgttaacgttgaaggtgatctccacgccttcggaacgaccgatccagttacgctgcatggttttaacggtgtctggccagtgatccagtttatccagatcgttgagcagctcgtcagcgtaagcagtgattttgataaaccactgcgggatctctttacgttcaactttggtatcgcagcgccagcagcagccgtcgataacttgttcgttcgccagtacggtctggtcgttcgggcaccagttgaccgcagaagtcttcttatataccaggccttttttatacagctcggtgaagaatttctgttcccaacggtagtattccggcgtacaggttgccagctcgcggctccagtcataaccaaagcccagcattttgagctggtttttcatatacgcgatgttgtcgtacgtccacggtgccggagcggtgttgtttttcaccgccgcgccttccgcaggcagaccaaacgcgtcccagccgatcggctgcaggacgtttttgcccagcatacgctggtagcgggcgatcacgtcaccgatggtgtagttacgtacgtggcccatgtgtagtcgaccagaaggatagggaagcatagacaggcagtaatacttctctttgctctcgtcttcggttacttcaaatgtgcgcttctcatcccaatgaagctgtactttggattctatctcttccgggcggtattgctcttgcatggcagccagtggtcctgttttcaatacggctacaaatgtagcgttgaggtggtttttcagatccgcatagcatagcccaaacgtccgcgtcaaaacagcctttcgcgcactcgacgttgaaatgatgcccggattattcatacattaatttacagagtttgtgggcgtattagcaaagcaaggaacaaagaacgtctattattatagtcagttaacgacccgggagatgaaacgatgaacaaggttgctcaatattaccgtgaactggttgcgagtctgagcgaacgcctgcgcaatggcgaacgtgatatcgacgcactggtggaacaggcgcgcgagcgcgtaataaaaacaggggagttaacgcgaaccgaggtcgatgagctgacgcgagctgtcagacgtgacctggaagagttcgccatgagctatgaagagagcctgaaagaagaatctgacagcgtctttatgcgggtgattaaagaaagcttgtggcaggagctggcagacatcaccgataaaacgcagcttgaatggcgcgaagttttccaggacctcaatcatcatggggtttatcacagcggagaagtggtcgggctgggaaatctggtctgcgagaaatgtcacttccatctcccgatctacacaccggaagtgctgacgctatgcccgaaatgtggtcatgaccagttccagagacgcccgtttgagccgtaatagtctgatttcgcacagcaataaagagaatatgggccgaatgaaattccccggcccttgtttttatctttacagtaaatcttcagtctcacgaatttcctgactgacatctctggttccggaactctgaactttacgatacaggtcgagagcctgtcggagatcgacaggtcttccttctccgtagtgatacataatggccaggttataccaggcagtggcgtcattgcattcagcggctttcgtaaaccattcaaaggcagcctgataatctttctcaacgccttgtccgtgtttatacatataaccgatgttgacgtaagcgccgacgctcccctgagcggcagccttcagataccagtacatcgcttgcttatagtcctggtccaccccttcgccagcgttataatcccatgcaatttgaaactgggcgtgccgattaccctgctgtgcgcttttcaaataccagaatgcggcgagtgtcttgttttgagcaacgccttttccgtcttcataaagatcggccagattgttttgcgcgtcactatggccttgtaatgcagcttgtttgtaccagaaaaatgccagcgcatagtcttttgcgactccgttgccatttctgtacatccacccaagattattttgcgcataagacattccgctctccgcggctatctgataccagacaaccgcttctttataattgggggcttctccacgatccagtgtccagccaagggcgttggaagcgaaagtatggccttgtagggcagcttttttcagccagaagatggcttgctcattatctttatgacggcttttatcctcggtatacttttgccctaaggaatactgtgcttcacaatgaccttgctcagcggccagcttcagccagtaaaaggctttttcgtcgtccggagaatcaattgcgctatcgcgattataataaaacccaacaatatattgagcctcgcaatcgcctttttcagcacgttcgataatctcatctatacttaaattatcgcagcaactactcgtgaaaatcattatcatttccttatggttgcagataaaacatattatatttttatgtgttccatttttgcgtaagccttattttatgcgtattatgtcgcgtcagaaaagtataaataaacgagcctcgcaatgcggctaatattcatttaatgaatatttaaggataaattatatggacatggagagccaaaaaatattgtttgcactttccactccgatggaaatacgcaatgaatgctgtttacctagccatagtagtcccaaaatgtatttaggtacatgcttttttgacctttcttccagttggggaattgatgaccgtgatgacctgctgcgcacaattcaccgaatgatcgataacggtcatgccgctcggttggcagggttttatcaccgctggtttcgttatagcccatgtgaatggcgtgactatcttgctgaactaaatgagcaaggtcaggcttatgcgcaatttgtcgccagcaccgccgaatgctgtggcgaagggggaatcaaagcctgggattatgtccggatgggttttttaagccgaatgggcgtacttaataactggttgagcgaagaagaaagtctatggatccagagccgcattcatctacgggctctacgttattatagtaactggcggcaatactttgccggttatacctttggtcggcaatattggcagtctcccgaagatgatcatctgcctttattacgcgaattcttagcgcgtaaagaatacgacgattccggcaatgatatgttttatcaattatttgccagtgatgatgcgtattaccctaccttgtcctggcaaccattggcttactattctgcatgcccggaaacgcttaaggatatgagcgacctatgaaaaattgctggaagatcctcgatatagaggaaacgactgacgtcgatattatccgccgcgcttatctggcgctgttaccgtcctttcatccagaaaccgatccgcagggttttaaacaacttcgtcaggcgtatgaggaggcgctacggattgcgcagagccctgctaaatctgtttggcaaccagaagaatatgaggtagcagaacatgaaattctgctcgcctttcgtgcgttacttgcctctgatagtgaacgttttctgccctccgcctggcagcgattcattcagcaattaaattattgcagcatggaggagattgatgaattacgctggagcctgtgcacaatcgccatgaacactgcccatttatccttcgagtgcgtggtgttattagcagaaagattgcggtggttacaggaggaaaataccggggaaatagacgaagaagaactggaatcctttttatatgccattgcgaaggggaatgtttttaacttccagaccattctgcatctgcccgttgccgtgcaaaatgacaccatcgatttttaccaaatgttcgctcggatttggagtagccatccacaatggctgacattgtatttagcgcaacatcgcgcagtgattatccccgatgatgcaaaactgcacagaaatttactccgctggtatagcgcaggtcgcctggatatccccgaacttctggattacgcccagagttggcgggaaactgaacctgataatgaagatgcgccttattatgaatacgcgcaacgcgtctattgtggagaaggcgaaagcctgttggcagaactttgtgactactggcgcgagtatccctccacccaggcggatgctttaatgttgcaatggtgccgtcagcatcgggtcgattattacccattactggtgatgatgattgaagcgcgtgatctggttaacgatcagggaaaaccgctactttatgtccccggcgacagcgcccgtacgcgttttcatttatacgaaatactcagcgatgaaaaactctctgcgctggggcgtagtctggtcgagatggttttgcacaaaggacgtaagccgcggatcagtctcacgcgtgatacagaacataccttatggccattatatctagttgccaaacaattagtgcaggcctgccaacctacagaagaaagtttaatgccgattgtgagccgccttgatgcagaaaatcgttgtccactggaagcattaattattcgtcgattattaattcaggcggcgaattttaccgagaagcaaactgttgaaccggagccgcaaccgcagccaatgcccgttgacgatggtgggccaggctgtctgggcatcattaaaattattttctatatttttatctttgctggtttgatagggaaaatactccatctgttcgggtgacagtcgacgttaatgtgcgggaagcccggcaagtaatctttccgcatttttgtaatgttgtttggcggtcagttttaaccatttttgagattcataatggttaacattaataccactgccatttctgtagatcaaacctaaagtatattgagcatgagcatacccttgttcagctgcttccttataccagagaattgctttacgggtgtcgggtttgacccccagacctttgaggtagatccaccccagtttactttgcgcgcgtggattttcctgttccgcactttgctcataccagtatctcgcctgtgtataatccagtggtttaccgtcgctaccatgaagataaaattctccaaggcgatattggctcgtactgtgaccatgaatcgcggaaagctccgtggctgccgtggtgaatggaagactgcccggactgcttaaataatcaaaggcataattcaccatggctttatcacgcaacgtcgttttcttgggttggctaatacaggtaattgctgcaactataaaaattgcgaatatatacattaattttttattcatgtgtgaatgcttcgattttctttttattttgaaagcgtcaagtttatactcatcaataataaaaaagtagtcagttaatgcacttaagggattattaacaaatgaataaggaagaacaatatcttctttttgcgctttctgcgcccatggaaatacttaatcagggttgcaaacccgcgcatgacagcccaaaaatgtatactgggataaaagaattcgagctcagtagttcctggggaataaataatcgtgatgatttaattcagactatttatcagatgactgatgatggtcatgccaatgatttagctggcttatatctgacatggcatcgctcttcccctgaagagtggaaagcattaattgctggtggcagcgagagagggttgatttatacccaattcgttgcccaaaccgctatgtgctgtggggaagggggaatcaaagcctgggattatgttcgaatggggtttctgagtcgggtcggtgtgctcaacaagtggctgacggaagaagagagtttatggctgcaaagccgcgtctatgtacgagctcaccattactatcacagctggatgcactatttttccgcctatagcttaggacgtctctactggcaatcttctcagtgcgaagacaacactagcctacgcgaggcgctaaccctgtacaaatacgatagcgccgggagtcgtatgttcgaagagctggcagcgggaagcgatcgtttctatgccacgcttccctggcagccattaactgtccagtctgaatgcccggtaacgcttaaggatgtgagcgacctatgaaaacatgttggcaaatcctcgaaattgaaagcacgacgcaaatagacattatccgccaggcttatcttgctcgcttaccgttgtgtcatcccgaaaccgatccgcaagggtttaaagcattacgccaggcctatgaagaggccctgcgactggcggtaaatcctgtcgaggaagcagatgatgaagaaaaagatgctgccgctgaacatgaaatactacgtgcattcaggacattactggatagtgaaagtgatcgttttcagccttccgcctggcagaaatttattcagcaattaaatacctggaacatggaggatgtcgatcaattacgctggccgctgtgtgcaatcgccatagaagcgcgatatcttagtttaaattgtgcttctttgctggcagagcgtttgaactggcatagttttaatgacagcgaaggaatggatgaggaagaaagggaggcttttcttgaggccattcaggctggtgattgtttcgatttccttagccttctggaatatcccattgcgttgcagaaccagactgttgagtattacttcgcgctggaacgttgctgccgttaccatcctgactatgtcactgcgtttttggcgatggaaggtccgtggttaattcctgatgatgcaaagttacatcgcaaactgttgcgctggtacagcagcgtgcaaacaggtatggcggaactcattcctgtcgctcaacagtggcaaacggaagaaccagaaagcgaagatgcccggtattacttgtgtgcacaacgtttgtactgcggcgagggggaaagcctgcttgccgatctctgcgcgtactgggaaagttacccatctacacaagctgataatttgttgttgcagtggagcaagcgtcattgcccggattatttcgcgttattagtgatggttatcgaagcgcggagcatggtagatgcgcaaggtcaaccgctgaaatatgttcctggtgagagcgcccggacgcggctgttatgggcggagattttacatagcggaaaattaagcccgttaggtcaaagctttattgagagcttattcttcaagcgcaaagcatgggcgtggtggaaaagcagagtcggtagcgagacagagcaagatagtccgttcctggatttgtatcgggtagcggaacaggtagtacttgaagcgtttccgaaacaagagatgctggcccgtcttaatacaaggctggaaggcggagatgctcatccattagaggccattgtcacccggatgcttttgacgaaagtgaaactcgagccggaggatgaagatgtcgatgagccaacacctgaaaatcatgaagaaaaaaatgatgagggtgaaaaaccacagagcattaccagcattatcaaaatcagtttaacggtgctggtgataggttatgctctcggcaaaatcgcgatgttgtttagctgacgatgtgttttttgcgccgatgccggatgcagcgtttacgccgcatccggcagccgtgtttatgggatctcaatggctaaataatcgctcgcccgccgccgaacttcatccacgcgggccatatcgttactctgcaacgccgcatcaaaatcggtgatcacccggccgatctcttctcgctcgtcacccagcgcccgcgcccacaactcttccagtttggctttaaaggtgcgattgatgagcatatcgcgcggataaattttcaatgcggataaccgcgtccgactctcttcaatctgctgcgcgctcaatgttaccgggctgtggttaatcactctggacttaacgctgccgtcttccagaagcacgtcaacttcaagcaacccgttgatatcataactaaagcgaatatcaatgctctgataagccccggttttcttcaacggcacatcgaaggattccaccagaatgttgtttttaactttgtggttttctccctgatagacgttaaccgtaatactatcctgttccgggtgcatggtactataagtttctacacggctcacgggcacagtggtgtttcgttcaataatcgggctgaaaatgccggaaacgccctggcggttaacttcaacgcccaagctgtaagggcaaatatcagtgaggattacctcttcaatatcttcactgcgtaagcggcaggcggcctggattgctgcgcccagcgcgacaatggtgctcggatcgtaactttgatacggtaatttgccaaacagacgcacggcgattcgctgcaccagcggcatttgactcgcgccgccaaccagcaccagactgtcgatttgactcggcttcagacgcgcatcgcgcaacgcctgttcaatcggcactcgcaagcgattgagcagcggcaaccacaaatcttccagttcgttctcgtaaaattcgcattcccgcgtttcttcctgatactgccagcgaatgtgcaatgggctttgattgctacattttgccgcttccacacaggcgtacaaggctgccagttcactctcgttaagcgtggtcctggcgacatccgcgcgttttaaaacctcatcgaccagcatatgggtaaaatcttcgccaccaagaaagttgtcgccagcggaggcgtgaacttcaatcaccggcgtggcgtactcaagcaccgtaacgtcaaacgtgccgccaccgagatcaaacaccaggctacgggtattttgttgggtatgcaggccatacgccatcgcagctgctgtgggttcattaattaagcgtaccgcatttaacccggctaactccgctgctaaacgggtatgcttgcgttgttcatcgctgaaataagccggaacggagatcaccacatctttaatcggacgttgcagaaattcttcggcatcttcttttaaactgcgtaataccaaagaggacagttctggcgcgttaaatgtgtcgctgcctaaccgccagttggtattactgcccattgcacgtttaaataacgctgccgttttatccggatggctagtacgccgacttacagccggttttccgactaaaatatgattattttcatccatgctaattatggatggtgttaaatattcaccgaacttatttggaattaattgcgcggcaccgtctttccagacggcaattaaactattggtagtaccgagatcgataccaatggcgagttctgcattatccattgcatttatatcttgaaagaaaaagagataaacagattaagaccacccaggtaacgcgtggtgatcttaatcaatgacgtgtgttaagcgtaaaatttcagacgatcagccagtaaatcaacaaagccctgacgatcaacatcgaccattacggtggcattcggtttattgcctgtcagataataataatcaacaaccgtcataccctgggtatatttcccctgtgtttccacgccaacccagcgctcaacagaggtaaataactccggtttcaacagccaggcgatggtgcatgggtcatgcagtggtgcgccgacaaagccccatttttcgtctttatgatattcgaggaagaaatccagcagttcggcaacaatggtactaacagggttaccaatcgcgcggaaacgctcggtgtcttcaacgtggatttgtgctttatgagtaacatccagaccggccatcaccaccgggatcccactctggaagacaatttctgccgcttccgggtcaacgtaaatattaaattcagccgcaggcgtccagttacccagccccatagcgccacccataatcacgatacgggcaattttgctatgcagttccggatggctattgagcagcaaggcaacgttagtttgcggtccggtagacacaatggtgacaggttccgcactttcacgcagcgttttcgccatcagctctaccgccgtacagttttgcggtgcgaatgtcggttccggtaatgccgggccgtcgagaccgctttcgccgtgcacattgtccgcgataatcaactcacgcattaacggttttaccgcgccgcctgctaccggaatatcggtgcgattaagcaaggtcagcatacgcagaacattgcgtaaggttttttctggtgtctggtttccggcggaagacgtaattgctttgacatcaagctctggactggcgagggcgagaactattgcgatagcgtcgtcatgacctgggtcgcaatctaacagaattggcagtgccattgttgctccttgttgtgtgcttctttgcgacaagggtaacgccaggatgtaacagatacgaggggcgaaacgataaagcgtgagatggcgcgcaattgggtatgcgcgccagagtgattaatgcaggattttcgcgaggaagtcttttgcgcggtcgcttttcggatcatcgaagaaagcgtctttcgggctgtcttcgacaattttaccctcgtccataaagatcacccgattcgccactttacgggcaaagcccatttcgtgggtcaccaccatcatggtcattccttcgttcgccagttccaccatcacgtccagtacttcgttgatcatctccggatccagcgcgcttgtcggttcgtcaaacagcatcgcaataggatccatacacaacgcgcgagcgattgccacacgctgctgctgaccgccggaaagctgcgccggaaacttattggcgtgagcagaaagcccgacacgctccagcagtttcagggctttttcacgagccggcgctttatcgcgtttaagcactttcacctgcgccagggtcaggttttcgataatgctcagatgagggaacagctcgaaatgctggaataccatcccgacgcgggaacgcagctttgccagatcggttttcttgtcgttaaccacgataccatcgacggtgatttcaccttgctgcaccggttcgaggccgttgacggttttaatcagcgtacttttgccggaaccagacgggccgcaaaccaccaccacttcgccttttttcacttcggtactgcagtcggtcagcacctgaaagtgaccataccatttactaacatttttcagggtaatcattatgctgtccttcttttcaagtagctgaccaacaagctcgcgctaagactaataacgaaataaacaaatccggcaaacaggatcatctcaacctgcgtaccatcacgctcaccaatggtactggcggtacggaagaaatcggccagggataacacatacaccagactggtatcctggaacagtacgatgccctgagtgagcagcagcggcaccatcgcgcggaacgcctgcggcagaataatcagtttcatgctctgccagtgagtcattcccaacgccagcgcggcgctgctttgaccacgagaaatactttgaataccagcacggataatctcactatagtaggccgcttcaaacatgctaaacgccaccatcgcgctaattaaacggatatcattttttgggcttaatcccagcacgttttgcagaaaacccggcacgatcaggtaaaaccacagcaaaaccataactaaaggaatgctgcggaatacgttaacgtaggctttggcaaaccacgccacgggcgcaaagctggataaacgcatcaccgccagcatcgtgccccacaaaataccaatcactaccgccgtgacggtgattttcagggtgatcaccagcccgtcgagcagatatggcagggaagggacaatggaactccagtcaaactcgtacattatttgccccccatgttgccaggcaggcgaactttacgttcaaccagcgtcatcaccagcatgataaaagcgttaatcaacacatacgccagcgtaatggcggtaaagctctcccaggcatgggcactgtaatcgagcaatttacccgcctgcgccgccatatccaccagaccgatagtgctggcgatggcggagtttttcaccaggttcatcatctcactggtcatcggcgggacgataacgcgataagcattaggcagcagtacgtatcgataagcctgcggtagcgtcaggcccatcgccagcgcggcatttttttgccctcgcggcaggctctgaatcgcggcgcgtacctgttcgcaaacacgggcggcggtaaacagccccaggcagagcatggaactaaggaaaaactgaatattgggatccagctcggccttaaaccacatgccgattttctccggcagcagctccgggatcaccagataccaggtaaagaattgcacaatcaacggcacgttgcggaacagttcgacatacaacgtacccagaccagagagaaaacggtttggaacggtacgtaaaatgccgaaaaaactaccgacgaggaaagcgataatccaggcgcagatgctcaaagcgatcgtcacctgaaaaccactccagatccaaccaagataggtggtgttgccgaacggggcttgttgtaaaaaaataccccagttccagtctatagacataaatctactccagaaaaaagagggtagcagcgttaactgctaccctcgaagattgttacccagcgtattgcggttttcaggcccgatggggaacgaccatcaggcgtatagtctgtccgtgctacgtaacaatcgagagggctggaatttccgcccctggttcttgtaattagttcagtgccttgtcattcggttctttgaacagtgctttcatttcgtcactcagttcgaaattcatgttcaggtttttcggcggaattggatttttgaaccacttatcaaaccatttttccgcttcaccggaggtctgcacctgagcgatggtgtcatccatcagctttttgaactgcggatcatctttacgcaacatacaaccgtaggcctcctgagactgcggcttgccgacgatttcccagttgtctggtttcttcgctttcgcacgttcaccggccagcagagcgtcatccatcataaaggcaacggcacgaccgctttccagggtgcggaaagagtcaccgtgatctttggcgctgatgatgcgcatattcattttttgctcttcattcagtttgttgagcaaaacttcagaggtagtgccggaagtgacgactacggctttgtctttcaggttggcaaaatctttgatatcgccaccctttttggtcaacaggcgcgtaccgaccacgaaaatagtgtcagagaaagccgcctgtttttggcgttcgacgttgttggtggtagaaccacattcaaaatcgaaagtgccgttttgcagcagtggaatacggttttgactggtaatcggaatcagttttacctgcaagtccggtttgttgagtttctttttcactgcttcaacaatggcgttggagtaatcctggctgtaacccaccactttttgctgattgtcgtaataagagaaaggcacactagattcacggtgaccgacgacaatcacaccgtttttggcgattttgtccagagtactgcccgctgccggggcggcgtcatctgcctgtgccagtcctgcggaaagcgccagggcgaggattgctgtggcaggtttacgtaattgcatatccaactcctttatcttctgcgttaagaacgcatggatacccgttgtgagtgtttgtgttgttatcgtctgcaactttattgtgcagtgttgtgcctgttagggaaggtgccttaggtaacatttagtttggctaaatgtaaagatattgctgttttattgtttgtttttgcgagatgcgccgcaccattccgaagcaaaattcttaaaatgcactcttttagtgctaccgctggattactgtggtgcaactaggttgtactgatgctgtttcagggtttgccttgtataacaaagcaatagatgtgccaaagttggataggagaatattgttatccggataatgcactgatgccgcatccggtgagcgtgccgaaatatgggatgtattccggcacgataagaagggattatttacgtcgctgacgcagactcatcaacacagcagcaaaaccaaacaatgccgtcagcacccacagcggccagttgccggtacgtgcgtatggtgtgagtccggtggtcggcgtcacgttagtggttaacacctcgcgggtgaactgcgggatcatcgcctgaatctcaccctgcgggccaatcaccgccgtaatgccgttgttggtgctgcgcaacagtgggcgcgccagctccagcgcacgcattcgcgccatctggaagtgttgccatggaccaatagatttaccaaaccacgcatcgttggagatagtcagcagatagtcggtatccgggcggaagttatcgcgcacttgctcgccgagaatgatctcgtagcaaatagccgcagtaagctcaataccatttgcgctcagcggcggctggatatatggcccacggctgaagctgctcatcggcagatcaaagaacggtgctaacggacgcagaatgctctccagcgggacaaactcgccaaacggcaccagatggtttttgttatagcgatcggcactttcgtagctgtacggcgcacctttacccagcgtgatgatggtgttgtaggtatcgtagcggttctgcttattgagacgcgcgtcgacaatcccggttaccaggctgctacctttatcacgcaactcaccgtccagtgctttgaggaacggttgctgattaatttccagatcggttatcgcgctctccggccagataatcaagctacttttgcccatcagcggtgccgttgcgttgtagtaaatcttcagcgtattaagaagctggccttcgtcccatttcaggctttgcggaatatcgccctgaaccatgctaacctgaatggttttctccggttgtggggtaaaccactggatgtaacgcagcgggaagggaagggcaaacagcacgacggccaccaccagcggacgccagttgcgtttgaccaacgccagtgccagcaggccactaaccatcatcagcaggaagttaatggcttccacgcccattatcggtgccagcccttttaacgggccatcaatctggctatagccgaactgtaaccacgggaagccggtcagtacccaaccgcgcagaaactcggtcacttgccagagggcaggggcggcaatcgctacgcgcagccaggtggttttcggccacagacggctcagcacgccagcaaacagtccggtatacaggctcaaatacgccgccagcagcaccaccaggaagatgttaaccgggccaggcattccgccaaaggtcgcgatgctgacatagacccagttaataccgctgccaaagaggccaaatccccagcaaaagccaatagcggcagactggagtggacggcggttaaaggtcaacgcctgaagccccatcaggctaataatcgccgcaggccagacgtcgtaaggagagaaggccagcgttccgcaggcaccgaataataacgccagcagcaggcgaatgcgctggcgttcaattaaactggcaaaagccatgtagttatctatccagtttcggttttattcatccagcttcggctggggactgtcatccgggattttgacatgaacctgaataatacgccgactgtcggccatcgccactttgaactggtaaccgtcgatgtcgatagtttcgccacgcgccggaagatgcccaaatgcctgcatcaccagaccaccgatagtgtcgacttcttcatcgctaaagtgggtgccgaacgcttcgttgaagtcttcaatggaagccagtgcgcgtacggtccaggtatgacgactcagctgacggaagtcgatatcatcttcttcgtcatactcgtcttcaatctcaccaacaatcagttccaggatgtcttcaatggtcaccagaccggaaaccccaccgaattcgtcaataacgatcgccatgtggtaacgctgagagcgaaactctttcagcatccggtctacgcgcttactttcaggaacgacaaccgcctgacgtaacactttgtccatgctgaaggcttcagcatcgctgcgcataaacggcagcaagtctttcgccatcagaatcccttcaatgtgatctttgtcttcgctaatcaccgggaaacgactgtgggcggactcgatgatgacatcaagacattcgtccagcgtctggttgcgtttcagggtaatcatctgggagcgggggatcatgatgtcgcgaacgcgttggtctgcgatgtccatcaccccttcgagcatatcgcgcgtatcttcgtcgataaggtcgttctgcccggaatcacggatcagcgccagcagttcgtcacggtttttcggttcaccgtggaaaagttggctgagtaacagggagaaaaatcccttcttgttgcttatcgtgtcactactgtgactattgtcgtcgctcatggcgtcgtatgggttctcatgttagttaatcaaaacgccgtcgttaatcaccaacggcggggacgtctgccagtcaaatgcctggcaaattattctttctcggcaatgtacggatcctcatagcccagagcaagcataatctctgtttcgagggcttccatttcttctgcttcgtcatcttcgatgtgatcgtaacctaacaaatgcagactgccgtgcaccaccatatgcgcccagtgcgcctccagtggtttgccttgctcctgagcttccttctcaaccacctgacggcagataaccagatcgcccagtaggctcatttccatgccaggcggcacttcaaacgggaaggagagcacgttggtcggcttatccttaccgcgataggtcagattcagactgtggctttcggcggtatcgaccacgcgaatcgtcacttcgctttcttcctgaaactgcgggatcaccgcattcagccatgtctgaaactggctctcttccggtaacccggaattatcttcacatgccagttgtaaatcgaggatcacctgactcatttttgttcctgttcttcgcgcttgcgttctgctgccagcgccgcttttcgtttttgttcggcttcttcccaggcttcataggcgttaacgatacgcgccaccacagggtgacgaaccacgtcttcgctgtggaagaagttaaagctgatctcttcgacatcggccagcacttcgatggcgtgacgtaagccacttttagtattacgcggcaggtcgatctgtgtgacgtcgccggtgataaccgctttactgttaaaaccgatacgggtcaggaacatcttcatctgttcgatggtggtgttctggctctcatcgagaatgataaacgcgtcgttcagcgtacgaccacgcatataggccagcggtgcgacttcaataacgttgcgctcaatcagtttctcgactttctcaaagcccagcatttcaaacagcgcgtcgtacagcgggcgcagatacgggtctactttctggcttaaatcgccaggcaggaagcccagtttctcaccggcttctactgccggacgagtcagcagaatacggcgaatttcctgacgctccagggcatcaactgccgcagccactgccaggtaggttttacccgtacccgccgggccaacgccgaaggtaatgtcatggtcgagaatattggcgatgtactgcgcctggtttggcgtgcgcggcttaattacgccgcgtttggttttgatattgaccgctttgccgtactccggcacgctctccgcgctttgctccagtacccgcgcttctttaatcgcaaggtggatctgttccggttcgatatcctgaatctgaccgcgcatcggggcagtatcgacatacaggctacgcagaatgtctgccgcagcggtgacgcaaatcggacggccggtcagtttaaagtggttatcgcggcgattgatctcgatgccgagacggcgttcgagctgcttgatgttgtcatcaaacgggccgcacaggctcaacagacgcgcattgtctgctggctccagggtgatttcgcgagtgtctatgttcaaaccgttcctcttatctgtatgccgccggaagctgaacattcaccggcctataaggaaattattcacgccacaggaaaaaggcgcaagcattgcaataaagatggggataaagagagaaaaaacaaggcccaccggaacggcaggcctgagaattacggctgataataacccacgccaaggtcgttttctttgcgggtacgggcaatcacactttccggtgtttctgccacgcgcagacccatttcatcttcagtacgcaccactttaccgcgcagagagttcgggtagacgtcggtaatttctacatcgacgaatttaccgatcatatccggcgtgccttcgaagttgaccacgcggttattttccgtacgcccggaaagctccatgatgctcttacggcttgtaccttctaccagaatacgctgggtggtgccgagcatccggcggctccacgccatcgcttgctgattaatgcgctcttgcagaatatacagacgctgcttcttctcttcttccggaacatcatcaaccatatcggcggctggtgtacccggacgtgcagagaagataaagctgtagctcatgtcgaaattgacgtcggcaatcagcttcatcgttttctcgaagtcttcggtggtttcgccagggaagccaacgatgaaatcagaactgatctgaatatctggacgcgccgcacgcagtttacggatgatcgctttgtactccagcgccgtatgggtacggcccatcaggttcagaatgcgatcggaaccgctctgtaccggcagatgcaggaagctcaccagctccggcgtgtcgcgatacacttcgatgatatcgtcggtgaattcgatcggatggctggtggtaaagcgaatacgatcgatcccgtcgatcgcagcaaccagacgcagcagatcggcaaagcttccggtggtgccgtcgtagttttcaccacgccaggcgttcacgttctgaccgagcaggttgacttcacgcacgccctgagccgcaagctgggcaatctcaaacagaatatcgtcggacggacggcttacctcttcaccacgggtgtaaggcaccacgcagtaggtgcaatatttattgcagccttccatgatggagacaaacgcggtcggcccttcggcgcgcggttccggtagacggtcaaacttctcgatttccgggaagctgatatctacaaccgggctgcggtcgccacgcacggagttgatcatctccggcagacggtgcagcgtttgcggcccaaaaataatatcgacatagtgggcgcgctggcgaatgtgctcgccttcttggcttgccacgcagccaccgacgccgataatcaggtctggattcttctcttttaacagtttccagcgacccaactgatggaagactttttcctgagccttctcgcggatactgcaggtgttcagcagcagcacatccgcttcttccgccacgtcggtcagttgatagccgtgggtggcatccagcagatcggccatcttgctactatcgtactcgttcatctgacagccccaggttttaatatggagttttttggtcatcgacttgctcttgcgaaatagtagccaggaatgcagggcgcatagtgtaatgctttgctgccgttgtgaccagtatgagcgttatcagcccttaggggtaaaaatcctgtaaacttaaagcatattgctaacaggatgattgaccatgacaaatcaaccaacggaaattgccattgtcggcggaggaatggtcggcggcgcactggcgctggggctggcacagcacggatttgcggtaacggtgatcgagcacgcagaaccagcgccgtttgtcgctgatagccaaccggacgtgcggatcagcgcgatcagcgcggctagcgtaagtttgcttaaagggttaggggtctgggatgcagtacaggctatgcgttgccatccttaccgcagactggaaacgtgggagtgggaaacggcgcatgtggtgtttgacgccgctgaacttaagctaccgctgcttggctatatggtggaaaacactgtcctgcaacaggcgttgtggcaggcgctggaagcgcatccgaaagtaacgttacgtgtgccaggcagcctgattgcgctgcatcgccatgatgatcttcaggagctggagctgaaaggcggtgaagtgattcgcgcgaagctggtgattggtgccgacggcgcaaatagccaggtgcggcagatggcgggaattggcgttcatgcatggcagtatgcgcagagctgcatgttgattagcgtccagtgcgagaacgatcccggcgacagcacctggcagcaatttactccggacggaccgcgtgcgtttctgccgttgtttgataactgggcaagcctggtgtggtatgactctccggcgcgtattcgccagttgcagaatatgaatatggcacagctccaggcggaaatcgcgaagcatttcccgagccgtctgggttacgttacaccgcttgccgctggtgcgtttccgctgacgcgtcgccatgcgttgcagtacgtgcagccagggcttgcgctggtgggcgatgccgcgcataccatccatccgctggcggggcagggagtgaatcttggttatcgtgatgtcgatgccctgattgatgttctggtcaacgcccgcagctacggcgaagcgtgggccagttatcctgtcctcaagcgttaccagatgcggcgcatggcggataacttcattatgcaaagcggtatggatctgttttatgccggattcagcaataatctgccaccactgcgttttatgcgtaatctcgggttaatggcggcggagcgtgctggcgtgttgaaacgtcaggcgctgaaatatgcgttagggttgtaaccttacaacattgccggatgcgtgccaaccgtaggtcggataagacgcggcagcgtcgcatccgacattgaaggataagacgtgtcaacatcgcattcgacattgaatgaacgcagaaaagcaaaaagctcgccgaagcgagcttttttaatgtggctggggtacgaggattcgaacctcggaatgccggaatcagaatccggtgccttaccgcttggcgataccccaactgggtgcacttacaaggtaagcgtcttgaataaattggctggggtacgaggattcgaacctcggaatgccggaatcagaatccggtgccttaccgcttggcgataccccaacaaattggttttgaatttgccgaacatattcgatacattcagaatttggtggctacgacgggattcgaacctgtgaccccatcattatgagtgatgtgctctaaccaactgagctacgtagccagattgtttcttcgatggctggggtacctggattcgaaccagggaatgccggtatcaaaaaccggtgccttaccgcttggcgataccccaataaccgggcggtgaaccgcttactcgaagaagatggctggggtacctggattcgaaccagggaatgccggtatcaaaaaccggtgccttaccgcttggcgataccccatccgtacaacgctttctggtgaatggtgcgggaggcgagacttgaactcgcacaccttgcggcgccagaacctaaatctggtgcgtctaccaatttcgccactcccgcaaaaaaagatggtggctacgacgggattcgaacctgtgaccccatcattatgagtgatgtgctctaaccaactgagctacgtagccatcttttttttcgcgataccttatcggcgttgcggggcgcattatgcgtatagagccttgcagcgtcaacctctttttcaaggaaaattgctcgaaagtgactgtttggttaggttgcgaacagcgtggcgctatattcgtcaattattgtttactttgtgttttttcccaccctacagccattcttttgtcatacaggatgaaattcggaatttaacaatagtggtgggaaattaatctatgaaatactggcctacagtgatgagttgtcaaacagtgatgtggcaaacccggaacatttccttactgcatatcagaatcaacaagcacctcaataactgaaacagccccggatttcaccggggctgtttcgcatttcttacttatacgcgctctggtgaacaccaaccgcgcgaccagacggatcgtccattttcttgaacgcttcatcccattcgatcgctttagcggaagaacaagcgacggaaggaccgcccggcacgcactcagcggcgctcggaagcgggaatagttcttcaaagatctcccgatacaagtacgcttctttagaggttggcgtgttgtacgggaagcggaagcgggcagtttccagttgctgatcagaaacctgctgcgcagccacttctttcagggtgtcgatccaactgtaaccgacgccatcggagaactgctctttctgccgccaggccacgcttgcaggcagatacgcttcaaaacattcacgcaggatgtgtttttccattttgccgttaccgcacattttatcctgtgggttaatacgcatcgccacatcaaggaattttttgtcgaggaacggaacgcgtgcttccacgccccaggcactcatcgctttgttggcacgcgcgcagtcatacatatgcagggccagcagtttacgcaccgtctcttcatgcagttctttggcattcggtgctttgtggaagtaaagataaccgccgaacacttcatcagaaccttcaccggacagcaccattttaatgcccatcgccttgatcttacggctcattaaatacatcggtgtactagcgcgaatagtggtcacatcataagtttcgatgtggtaaatcacgtcgcggatggcatccagaccttcctgtacagtgaagtgaatttcgtgatgcaccgtgcccagatggtttgccacttcctgggctgctttcagatccggactacccggcagacctacagcaaaggagtgtaactgcggccaccaggcttcagagcgttcctgatcttccacgcgacgggctgcgtatttcttggtgatagcggaaataatactggaatccagaccaccagaaagcagcacaccgtaaggcacatcagacatcagatggcttttaacactatcttccagtgcctgacgcagctcgtttttgtcggtcacgttatctttcaccgcatcgtagtcgaaccagtcgcgatgatagtaagaacggatttcgccgtcctggctccacaaatagctccccgccgggaactctttaatcgtgcggcaaactggcaccagcgctttcatttcactggccacatacagctgaccgtgttcgtcataccccatatacagtgggatgatccccagatggtcgcgaccaatcaggtaggcatctttttcgctgtcgtacagtgcaaaggcaaacatgccctgcaagtcgtcgagaaattccggccctttttcctgatacagcgcgaggatcacttcacagtcagacccggtctggaactggtaacgatcgccatattcggcgcgcaatgcctggtggttgtagatttcaccgtttaccgccagtacgtgggttttttgttggttgtagagaggttgcgcccccgcgttaacgtcaacaatactcagacgttcgtgggcgagaatggcgttatcgctggcataaataccggaccagtccgggccacgatgacgcatcaggcgactcagctcgagggctttcttacgcagctcaactgcgtctgttttgatatcgaatacgccaaaaatactacacataaccttctccgttaacctggtatttgttgcttgttgtgtttgcttgtttaaaaaaatgccgcaaagcagcactgtgcgcaagcgatttggcggtgaaaaaataaaaaacgtaatggtgattgtcgattggtgaaaaaaggtctggtgtgaggatatatttattgatgaatcgataatttttagcgggttttattgaatgtttatattttacgggggccaaattgctgacaaagtgcgatttgttcatgccggatgcggcgtgaacgccttatccggcctacaaaagcatgaaaattcaatatattgcaggagctgcgtaggcctgataagcgtagcgcatcaggcagtttggcgtttgtcatcagagccaaccacgtccgcagacgtggttgctattcagataacgtcgatttcagcgacactcgggtaaatccagctggggcggaaaggcatactgtcgatatcgtcgaggctgctaacaccagaaagcaccagaatcgtctccagacctgcctggaagccggccagaatatcggtacgcaggttatcgccgacaatcaccgtttcttcgctatgcgcctgcattttgtttaatgctgcgcggatgatccacgggctgggcttaccaacatagaacggtttgcgcccggagattttctcaatccctgcacacaacgcgccacaagcgggataaaaaccgcgcccgtgggtgtccggattggtggcgataaaacgtgcaccgttagcgacgaaataggctgctttatgcatcatgtcccagttgtaggaacgcgtttcgccaacaatcacgaaatcagggttcacatcggtaatagtgaaaccggctttgtacagttcatgaatcagtgcgccttcgcccaccacatacgctttcttgccttcctggcgacgcaggaaatcggcagtcgccatcgcagaggtataaaacacgctgtcaggtacatcgacacctgcggtggcaaagcggttcgccagatcttgcccagtctggctaggatagttggtcagcaacaccagcggcaggcctttatccataatcccgtgcaaaaattccgctgcacccggtacggcgacgttatcgtgcatcagcacgccgtcgatatcgcaaattacatttttaatggtcatggactacccagaatattgacaacaataagcgccactataaaagcacattaattttccagcaaatgctggagcaaaataccgttgagcatggcgcgttttaccagcgcaaaagcgccgattgcgctgcggtgatccagctcagaacgtaccaccggcagattagtgcgaaacgccttcagcgcctgggtattaatgcagctttcaatagcagggagcagcactttatcggcttcggtgatttcaccggcaataacaattttttgcggattaaataagttgatagcaatggcgatggttttacccagatgacgaccgacatactcaattacttcgctcgccagactatcgcctttgttcgcggctttgcagatagttttgatggtgcagtcgtccagcggcacgcggctctggtagccctgctttaacagattcaacacccgttgttcaatggcagcgttggcagcgatagtttccaggcagccaaagttgccgcagtggcagcgttcacccagcggttcgacctgaatatggccaatttcaccgacgttgccgttgcggccaataaaaatgcgcccgttagagataatcccggccccggttccgcgatggacacgcaccagaatggagtcttcgcaatcctgacttgcaccgaagtagtgctccgccagcgccagactacggatatcgtgaccaacgaaacaggtcactttaaaacgttcttccagagcttctaccagcccccagttttctacctgaatatgcggcatgtaatgaattttgccgctgtccgggtcaacaagccctggcaggatcacgctaatcgcgatcagctcgcgcagtttgcgctggtagctatcaataaactgagcaatggcattcaacagggcatgttccagcgtttgctgggtacgttccggcagcgggtaatgttcttctgccagcactttgctgctgagatcaaacagagtgatggtggcgtcatgacgaccaagccgtacgccgattgcgtggaaattgcgggtttcggtgacgatggagatagcgcggcggcccccggtggaggcctgctgatcaacttctttgatcagcccgcgttcgataagctgacgcgtaattttggttacgctggcgggggcaagctggctttgctcggcaatctgaatccggctgattggcccgtactggtcaatcaggcgataaaccgccgcgctgttaagctgttttacgagatcaacattacctatctgagcttgtccgcctggtgtcatactttctcttattgagttacgacctcgttaccgttaacgatggtcttggtgattttaaaatcaggtgtgaatgcagtcaggttggctactttacctgcggcgagtgtgccgagacgtttctcaacgccaatcgcacgcgccggatagagcgtcgccatacgtagcacttcatccagtgcgataccgcaatgttcgaccagattacgcacgccttcaatcatggttaaggaactaccgcttaacgtaccgttctcatccacacaaagtccgttacggtagtatattgttttacccgcaaaaatgaactgttcaatgttggcacctgctggcgcggtggcgtcagtaaccagacacagtttgtcgcctttcagacgtttagcgttgcgaatgttggcgtaatcaacatgcaggccatcagcaataataccgcaataaatgtcagcttcgtcgaggatcgcgcccgccaggccaggttcacgaccggtaatatacggcatcgcgttgtacagatgggtggcaaaggtaatccccgcgcggaaaccggcttttgcttctttcaacgtcgcgttggagtgaccggcagaaaccacaatcccggcatttgccagtttgctgatgacttccgcaggaaccatttccggtgccagggtcactttggtaatgacgtcggcgttttcacacaggaaatcgaccagcgcggcatcaggcttacgcacaaaattcggattatgggtgcctttttttaccagattcagccacggaccttccagatgcagacctaacgcctgattcggatgttttgccaggtactcgcgcataacgcgcacgccctgtttcatcagctcatcgctggtggtgataagcgtcggcagatagttagtacagccacttttctcattggctttctgcatgatttccagcgtttccacgctgaccgcttcagcggtgtcgttaaactgtacgccgccgcagccgtttaactgcacatcgataaaaccgggggagagaatggccccgttcagactacgttgttcgatctctggcggcagttccgctaccggacagacgcttttaatcaggccatcagcgataacaaccgcgtggtcatcaagaaattcgtggccggtaaagatccggccctgggttaatgcatacattctgacccccgattttaaaaaatattgccctgagcaaggagccagggcagggataacaattacagacctttgatattttctgcttctaattcattgaaatatcttaaagtcttaactttcagctccatggtggaaggttcatcgcacaccatgatcgctttcggatgcagttgcagacagctgatggtccacatatggttcacgcaaccttcaacggcggcctgcagcgccagtgctttctggctacccagcaccagaatcatcacttcttcggcatccagcagtgtaccaacaccgacagtcagggcatattttggcacctgattaacatcgttatcaaagaaacgagagtttgcgacgcgagtgtcatgagtcagggttttgatacgagtacgagaagccagagaagacgccggttcgttaaatgcaatatgaccgtcgttacctacaccgcccataaacagatgaatttttccgtaagaacggattttttcttcatactggcggcactcggcgtcgatatccggggcgttgccgttgagaaggttgatgttttctgctggaatatcaacgtgatcgaagaaattacggtgcataaagctgtagtagctttccggatgctctttcggcagaccgacatattcgtccatgttgaaggtgacaacgtgcttaaagctgacctggcctgctttatgcatttcgactaacgctttataggtggtcatcggcgtgccgccagtcggcaggcccagtacaaacggacgatcggcagtcggtttgaacgcattgatacgattgacgatatggcgagcagcccatttgccgacctgttcagcggtagtcagggggatcagtctcattattcacctcaataagtaaaatgtaagccgttggcggattaggcatctttaagcgtaacctggatttgcgcagacaggcgtcaatccgacctgattttttgaatgataaaataagttttctggtttagccagtaaaagggagtgataataacgatatttggtgacaaaactcacaaaagacacgcgtttaatttgcgatacgaattaaattttcacacactctgtagcagatgatctaacaatctgattacagaacatcggcagtacaatttgcagcaaaataaaaatacggcttgaaacgagccaaatagggttctcgtagggggaataagatgaatattttaggttttttccagcgactcggtagggcgttacagctccctatcgcggtgctgccggtggcggcactgttgctgcgattcggtcagccagatttacttaacgttgcgtttattgcccaggcgggcggtgcgatttttgataacctcgcattaatcttcgccatcggtgtggcatccagctggagcaaagacagcgctggtgcggcggcgctggcgggtgcggtaggttactttgtgttaaccaaagcgatggtgaccatcaacccagaaattaacatgggtgtactggcgggtatcattaccggtctggttggtggcgcagcctataaccgttggtccgatattaaactgccggacttcctgagcttcttcggcggcaaacgctttgtgccgattgccaccggattcttctgcctggtgctggcggccatttttggttacgtctggccgccggtacagcacgctatccatgcaggcggcgagtggatcgtttctgcgggcgcgctgggttccggtatctttggtttcatcaaccgtctgctgatcccaaccggtctgcatcaggtactgaacaccatcgcctggttccagattggtgaattcaccaacgcggcgggtacggttttccacggtgacattaaccgcttctatgccggtgacggcaccgcggggatgttcatgtccggcttcttcccgatcatgatgttcggtctgccgggtgcggcgctggcgatgtacttcgcagcaccgaaagagcgtcgtccgatggttggcggtatgctgctttctgttgctgttactgcgttcctgaccggtgtgactgagccgctggaattcctgttcatgttccttgctccgctgctgtacctcctgcacgcactgctgaccggtatcagcctgtttgtggcaacgctgctgggtatccacgcgggcttctctttctctgcgggggctatcgactacgcgttgatgtataacctgccggccgccagccagaacgtctggatgctgctggtgatgggcgttatcttcttcgctatctacttcgtggtgttcagtttggttatccgcatgttcaacctgaaaacgccgggtcgtgaagataaagaagacgagatcgttactgaagaagccaacagcaacactgaagaaggtctgactcaactggcaaccaactatattgctgcggttggcggcactgacaacctgaaagcgattgacgcctgtatcacccgtctgcgccttacagtggctgactctgcccgcgttaacgatacgatgtgtaaacgtctgggtgcttctggggtagtgaaactgaacaaacagactattcaggtgattgttggcgcgaaagcagaatccatcggcgatgcgatgaagaaagtcgttgcccgtggtccggtagccgctgcgagtgctgaagcaactccggcaactgccgcgcctgtagcaaaaccgcaggctgtaccaaacgcggtatctatcgcggagctggtaagcccgattaccggtgatgtcgtggcactggatcaggttcctgacgaagcattcgccagcaaagcggtgggtgacggtgtggcggtgaaaccgacagataaaatcgtcgtaagtccagccgcagggacaatcgtgaaaatcttcaacaccaaccacgcgttctgcctggaaaccgaaaaaggcgcggagatcgtcgtccatatgggtatcgacaccgtagcgctggaaggtaaaggctttaaacgtctggtggaagagggtgcgcaggtaagcgcagggcaaccgattctggaaatggatctggattacctgaacgctaacgcccgcagcatgattagcccggtggtttgcagcaatatcgacgatttcagtggcttgatcattaaagctcagggccatattgtggcgggtcaaacaccgctgtatgaaatcaaaaagtaatctgctttatgcctgatgcgacgcttgagcgtcgcatccaacaatgacaagcggtggagatcttctctgccgctttttttttcatcaatcatccccataatccttgttagattatcaattttaaaaaactaacagttgtcagcctgtcccgcttataagatcatacgccgttatacgttgtttacgctttgaggaatccacgatgagtgaggcagaagcccgcccgactaactttatccgtcagatcatcgatgaagatctggccagtggtaagcacaccacagtacacacccgtttcccgccggagccgaatggctatctgcatattggccatgcgaaatctatctgcctgaacttcgggatcgcccaggactataaaggccagtgcaacctgcgtttcgacgacactaacccggtaaaagaagatatcgagtatgttgagagcatcaaaaacgacgtagagtggttaggttttcactggtctggtaacgtccgttactcctccgattattttgatcagctccacgcctatgcgatcgaactgatcaataaaggcctggcgtacgttgatgaactgacgccggaacagatccgcgaataccgcggcaccctgacgcaaccgggtaaaaacagcccgtaccgcgaccgcagcgttgaagagaacctggcgctgttcgaaaaaatgcgtgccggtggttttgaagaaggtaaagcctgcctgcgtgcgaaaatcgacatggctagtccgtttatcgtgatgcgcgatccggtgctgtaccgtattaaatttgctgaacaccaccagactggcaacaagtggtgcatctacccgatgtacgacttcacccactgcatcagcgatgccctggaaggtattacgcactctctgtgtacgcttgagttccaggacaaccgtcgtctgtacgactgggtactggacaacatcacgattcctgttcacccgcgccagtatgagttcagccgcctgaatctggaatacaccgtgatgtccaagcgtaagttgaacctgctggtgaccgacaagcacgttgaaggctgggatgacccgcgtatgccgaccatttccggtctgcgtcgtcgtggttacactgcggcttctattcgtgagttctgcaaacgcatcggcgtgaccaagcaggacaacaccattgagatggcgagcctggaatcctgcatccgtgaagatctcaacgaaaatgcgccgcgcgcaatggcggttatcgatccggtgaaactggttatcgaaaactatcagggcgaaggcgaaatggttaccatgccgaaccatccgaacaaaccggaaatgggcagccgtcaggtgccgtttagcggtgagatttggattgatcgcgccgatttccgcgaagaagctaacaagcagtacaaacgtctggtgctgggtaaagaagtgcgtctgcgtaatgcttatgtgattaaggcagaacgcgtcgagaaagatgccgaaggtaatatcaccaccatcttctgtacttatgacgccgataccttaagcaaagatccggcagatggtcgtaaagtcaaaggtgttattcactgggtgagcgcggcacatgcgctgccggttgaaatccgtttgtatgaccgtctgttcagcgtgcctaacccaggtgctgcggatgatttcctgagcgtgattaacccggaaagcctggtgatcaaacagggctttgctgaaccgagcctgaaagatgcggttgcgggtaaagcattccagtttgagcgtgaaggttacttctgcctcgatagccgccattctacggcggaaaaaccggtatttaaccgcaccgttgggctgcgtgatacctgggcgaaagtaggcgagtaattttaagtttcgctatgccggatggggcgtttacgtcgcatccggcaaggaacagacaaacagtttcaaacgctaaattgcctgatgcgctacgcttatcaggcctacatgatctctgcaatatattgagtttgcgtgcttttgtaggccggataaggcgttcacgccgcatccggcaagaaacagcaaacaatccaaaacgccgcgttcagcggcgttttttctgcttttcttcgcgaattaattccgcttcgcaatttatccataaaataaatttaaaataacaaaacataattaaataaaatgtaaccgctttcatcttgctggaatttcacgcttttattcttctgcaagcctttcaaccgcaaacttaagccttgtaacaaaaatcatcaaaatatgtgcggttgctcatgttcttacattctggttacagaaagagattgataattcgcgtcgcgaaaaatagtctgttcctgtagtcagcgagacttttctcaacgctacttttttaatttttattttttcgctgttcacctttggtgcagcaatttatacgtcaaagaggattaacccatgcgtacgtttagtggcaaacgtagtacgctggcgctggctatcgccggtgttacagcaatgagcggctttatggcaatgccggaggctcgcgccgaaggattcatcgacgatagtaccttaaccggcggtatctattactggcagcgtgaacgcgaccgtaaagatgttaccgacggcgacaaatacaaaaccaacctttctcactccacctggaatgccaacctcgattttcagtccggttatgctgctgatatgttcggccttgatattgctgcgtttacggcgattgaaatggcggaaaacggcgacagctcccacccgaacgaaatcgcgtttagtaaaagtaataaagcctatgacgaagactggtccggcgacaaaagcggtataagcctgtataaagctgcggccaaatttaaatacggtccggtttgggcgagggcaggttacattcagccaactggtcaaacgctgttagcgccgcactggagctttatgccaggtacttatcagggggcggaagccggggcgaattttgattacggcgatgctggtgcgttgagtttctcctacatgtggaccaacgaatacaaagcgccgtggcatctggaaatggatgagttttatcagaacgataaaaccaccaaagttgattatctgcactcctttggggcgaaatacgacttcaaaaataacttcgtactggaagcggcatttggtcaggcggaagggtatatcgatcaatattttgccaaagccagctacaaatttgatatcgccggtagcccgttaaccaccagctaccagttctacggtacccgagataaagttgacgatcgcagcgtcaacgacctttatgacggcaccgcctggctgcaagcgttgacctttggttaccgggcggctgacgtagtggatttgcgcctcgaaggcacctgggttaaggctgacggtcagcagggatacttcctgcaacgtatgactccaacctacgcttccagtaacggtcgcctggatatctggtgggataaccgttctgacttcaacgccaacggcgaaaaagcggtcttcttcggtgcgatgtatgacctgaaaaactggaatcttccaggcttcgccatcggcgcttcctacgtttacgcatgggatgctaaacctgcgacctggcagagcaatccggatgcgtactacgacaaaaaccggactattgaagagtctgcctacagcctggatgcggtctataccattcaggacggtcgcgccaaaggcacgatgttcaaactgcatttcaccgaatacgacaaccactccgacatcccaagctggggcggtggttacggcaacatcttccaggatgagcgtgacgtgaaatttatggtaatcgcaccattcaccatcttctgatgcccgacgcggcaggttttgtgcctgccgcacgtttgaggaatttgctatgaaaaaactgattctcatcgccataatggcaagcgggctggtagcttgtgcgcaaagtaccgcgccacaggaagacagtcgtctgaaagaggcatacagcgcctgtatcaacaccgcacaaggtagcccagaaaaaattgaagcctgccagagcgtgttaaacgtgctgaagaaagagaaacaacatcagcagtttgccgaccaggaaagtgtacgcgtactggattatcagcagtgtctgcgtgcaacgcaaaccggaaatgatcaggcggtgaaagccgattgtgataaagtctggcaggaaatacgcagtaataacaaataagtgagagctgtaactctcgcttttcttatttcccttgcataaaaaagccaacccgcaggttggcttttctcgttcaggctggcttatttgccttcgtgcgcatgttcatcttcgcggcaatcgccttcggcacagtgaccgtaaagatagagactgtggttagtcaggcgaatgccatgttttgcggcaatttcacgctgacgcgcttcgatggaatcatcactaaattcgataaccttgccgcagtcgaggcagatcaggtgatcgtggtgatgttgctgtgtcagttcaaatacggatttaccgccttcaaaattgtggcgggtgacgataccagcgtcgtcaaactggttcagtacgcgatataccgtagccagaccaatttcttcacccatatcgatcagacgtttgtataaatcttccgcactgacgtgatggttgtccggctcctgaagaacttccaggatttttaaacgaggaagcgttactttcaggccagctttctttagggcggtattgttatcagtcatgcggaatctgtcctgttactaagcggttcacttcattagaagaagtgacagaatttgctcttgagataatgcgtatcattatagaattgccacgcctaaatgaaaaccacaagtccctggcaaatattgttaataaaaacgtggcacagcttacatttacaacggcaaggccacttgaacaccgggacattgtacaggtacaacagcaaaagttacaaatttgtagcaattattttgattggcattatctattaatacggcgtagacatgagtctacgccgcatcacatcaggcattgagaatttcgtcgagatgcaactcttcagaaatctgtttaacccatttttctacacgttcagcggtcagttccggctgacggtcttcgtcgatagccagaccgacaaagtggtcgtcatctgccagacctttacttgcttcgaaatgatagcccgcagttggccagtgaccaacgatggttgcaccgcgcggttcaatgatgtcgcggatggtgcccaatgcgtcgcagaaatattcggcgtaatcttcctggtcaccacaaccaaacagcgcaaccagtttgccgttgaaatcaatctcttcgagagtcgggaagaagtcatcccagtcacactgcgcttcgccgtaataccaggttgggatgcccagcagcagaatgtcataagcttccagatcttctttgctgctttttgcaatgtcatggacatcggcaacgtctttaccaagctgtttttgaatcatttttgcgatattttcggtattaccggtgtcgctgccgaaaaagatgccagtgatagccatgagtgaaataacctcttgaaacttattgaaatgggggtggaaaattgcccacggataaaggcaatcatagcagaacaggcagtcttgcggaatcagcaaacgagcaggactgcacactgtgctacatgaaagtggaaatttaaacgatgccctgactacgcagcgccgccagttgctgcattaacatctcttcgatcagttcgctacggctcatattgcggctctccgccagctcgttcagcgcctcgacagcttccgcgttcagcttcagttcgacacgcttaaggccacgtactttgtcgcgttttagctggttgcgtttattaatacgcagctgttcatcgcggctaagcggattagttttcggtcgtcccggtcgacgctcgtgcgcgaacagatctaatgtcgtacggtccgtttgttctttggccatgatcttggtgacttcgggggaaacaatcagccaggcctctgcccggatggatagcgcgccataatacatcagcgcgatgagtcacgccaacgcccacgcgcggaaagcgacgcggacgctgggtttttaatcagttgcgttaatcattgagatagcgacggatagcgcgtaataccgcatccggtttttcagcatggacccagtgacccgcgcctgcaatcacatgcgcccgtgcctgtggaaattgagccagtaaatcatcacggtactgctcgctaacatacggagaattgccgccagggataaacagggcagggtgatcccatgccgggattttctcccaacctacaatatgcggatactgatcccacaataccggcacgttaaagcgccactccccgtcaacaaaagatttcagcagaaactgaatcaccccttcttcattaagatgctggcgcattattgctgctgcttgctggcgagtttgtgcgtcgctttcactgaccgcgttgatagccgcaaaaatctcatcatgacggcgtacgtgatagtcgaccggcgcgatatcgatcgccaccagtttatcgatgcgatcggaggctagtgcagtaagtgccattaccgctttaccgcccatggagtgaccgataaatgttgctttgtcgatctgctgtgcatccagagtatcaacaagatcctgcgccatcgccgggtaattcattaccggatctctcggactaagaccgtggttacgcatatcaacctggatgatattgtgatcgtttaccagatcgcgagccagtacgccaaggttgtcgaggctgccaaacagaccgtggacaagaacgatgggagaattattgtgctggttttgtgcagtttgcgcgcggatattcaatttcatggcaaagttctttttttcgcgttgtcgggttagggtattatgttgaccattgtgccacagggctgcaacaaataaggtttattccgagtttttctgcaagccaggcttgacgctatccgctgccgggatttattcatatactcctggcgacttgtattcagctaagacactgcactggattaagatgaaaacgattgaagttgatgatgaactctacagctatattgccagccacactaagcatatcggcgagagcgcatccgacattttacggcgtatgttgaaattttccgccgcaagtcagcctgctgctccggtgacgaaagaggttcgcgttgcgagtcctgctatcgtcgaagcgaagccggtcaaaacgattaaagacaaggttcgcgcaatgcgtgaacttctgcttagcgatgaatacgcagagcaaaagcgagcggtcaatcgctttatgctgctgttgtctacactatattctcttgacgcccaggcgtttgccgaagcaacggaaagcttgcacggtcgtacacgcgtttactttgcggcagatgaacaaacgctgctgaaaaatggtaatcagaccaagccgaaacatgtgccaggcacgccgtattgggtgatcaccaacaccaacaccggccgtaaatgcagcatgatcgaacacatcatgcagagcatgcaattcccggcggaattgattgagaaggtttgcggaactatctaaaacgttgcagacaaaggacaaagcaatggcaatccacaatcgtgcaggccaacctgcacaacagagtgatttgattaacgtcgcccaactgacggcgcaatattatgtactgaaaccagaagcagggaatgcggagcacgcggtgaaattcggtacttccggtcaccgtggcagtgcagcgcgccacagctttaacgagccgcacattctggcgatcgctcaggcaattgctgaagaacgtgcgaaaaacggcatcactggcccttgctatgtgggtaaagatactcacgccctgtccgaacctgcattcatttccgttctggaagtgctggcagcgaacggcgttgatgtcattgtgcaggaaaacaatggcttcaccccgacgcctgccgtttccaatgccatcctggttcacaataaaaaaggtggcccgctggcagacggtatcgtgattacaccgtcccataacccgccggaagatggtggaatcaaatacaatccgccaaatggtggcccggctgataccaacgtcactaaagtggtggaagacagggccaacgcactgctggccgatggcctgaaaggcgtgaagcgtatctccctcgacgaagcgatggcatccggtcatgtgaaagagcaggatctggtgcagccgttcgtggaaggtctggccgatatcgttgatatggccgcgattcagaaagcgggcctgacgctgggcgttgatccgctgggcggttccggtatcgaatactggaagcgtattggcgagtattacaacctcaacctgactatcgttaacgatcaggtcgatcaaaccttccgctttatgcaccttgataaagacggcgcgatccgtatggactgctcctccgagtgtgcgatggcgggcctgctggcactgcgtgataagttcgatctggcgtttgctaacgacccggattatgaccgtcacggtatcgtcactccggcaggtttgatgaatccgaaccactacctggcggtggcaatcaattacctgttccagcatcgtccgcagtggggcaaagatgttgccgtcggtaaaacgctggttagttctgcgatgatcgaccgtgtggtcaacgacttgggccgtaaactggtagaagtcccggtaggtttcaaatggtttgtcgatggtctgttcgacggcagcttcggctttggcggcgaagagagtgcaggggcttccttcctgcgtttcgacggcacgccgtggtccaccgacaaagacggcatcatcatgtgtctgctggcggcggaaatcaccgctgtcaccggtaagaacccgcaggaacactacaacgaactggcaaaacgctttggtgcgccgagctacaaccgtttgcaggcagctgcgacttccgcacaaaaagcggcgctgtctaagctgtctccggaaatggtgagcgccagcaccctggcaggtgacccgatcaccgcgcgcctgactgctgctccgggcaacggtgcttctattggcggtctgaaagtgatgactgacaacggctggttcgccgcgcgtccgagtggcacggaagacgcatataagatctactgcgaaagcttcctcggtgaagaacatcgcaagcagattgagaaagaagcggttgagattgttagcgaagttctgaaaaacgcgtaaacacatttaataaaaaaagggcggtcgcaagatcgcccttttttacgtatgacaaacacagaattgcctgatgcgctacgcttatcaggcctacgaggatggtgcaatatattgaatttaagcgattttgtaggccggataaggcgttcacgccgcatccggcaaaaacaacgaacactttgtcaacaaactgagtagctcaaggaaatcccaatgaagaccaacaggagtctggtcgtcatagtgagtctaattaccgccacattactgctgactgcatgcgcccaacctgaacaaagtagtttagctggcgactggttactgacccctaaagataaaaccagaggattaacgggtagcattgcggtaaatattgcacctttccggtgtaagacaaattgccgtggtgataacttacctgataatacccgccgctggcagttgagtggcgggaacgaaaaagaacttacttatcttcataatatgagtgcacaagaaaaggtcggtttaaatcccggttggcaatgctacaccagtttttttatgcgggtttgccagggcaagcccggcactcgaccgatagtcaatgaggattatgtcagcgaaagcggattttttggcagcatgatgcatgtcgggattattgagttacgacgctgccagagtgaaaattgccagcaagaattgaaagcgataaatacacattaaaatagtgagtccgggaatgaaacccggacctgaacatgtcttattgcgtgaatgtttctttcatttgatactgcatttcccagagttcagtaaggctaataacttttcttgttcttgcttcttcactttgtacccataagaaagggtagaacgtgaaggcttccgttgcgcttaattttattacgtcttctcgccattgctgccatcgtacattttcatagaaggtatctaaatcaccggataatgcccactgaagaaactcagaatatccaacttccagactttcccaattcagcgtatctggcgcaaaataataaacgcagccagtatcttccccaagatcgccaccattaagagcaaaaattacccctgcgacatcgtcagcgatgggtaaagcccgcacgcctgcgaattcagggcgttgtgtccaacttactggatctcgtggcaaccgggggtgaccagatcctgctatgcgtaattaaccattatcaatcagcagacctccggagccatagacaagcgcacccatcggactttttgttgtcacctgtaattgataaagtgcggtttcggctaaatctttattaaccggtaagagttcggtatggtttgtggcgtcttttaaccagttctggattattggccaggcactatcttcagtatttactaactgattcatttcacgcatcgctacttgctccttgtgtgctacggtgtcatttatgatgaggaattgtatggaacattttttaaatattaagttccttatatttgaataaaaaatgactttatccatacattgccacttttttcaaagcataaaccgatacccaataccggtttcagtaataaaatggcgaggccgggccggatcctgttccagtttttgtcgcagatgccccatataattacgcaaatagttgctgtgttcgatcgcgtttagaccctacatctgccggatgcggcataaataacgaactatttgccaacaaacagaaagggcgatcattcaatcgcccttttttactttgttttattaaccgtgtttatttttcagttcaaagcgtggacttaccagaccatacagtgtccaaccaaggaaggtcacgatggaaccgtacagcatggcttcttccccggaactgtacagcgcataaaagctatacatcgcgccaacaaaagcaacaaagtttgcaactttcgctttactggggggcacattagcgaccttctgaataatgactaatgccgccatactcagaatatacggaatgatattggtcaccacggccaggttaaccagcacgttgaactgactgtttaggctcgggctaatggtcatcagtgccaatccactctgaataatcacaatggtcaacattccctgcaccggtgcatccactttggttacacgggagaaaattttagggaagtagccttcatcagaactagatttaaacacctgggcaatggtgaactgccagccaagtaggctaccgcagcaggacatcaccatcagcgccataatgactttacccacttccggcgtgaacatctgcgcgaaggccagaccaaatggtgccgtactatttgccagctccatatttggcacaatcccggcaatcacgttggtggagacgatataaatcaccgccgcacctaacgtaccgccgagtaccgcgattggcacattacgttccgggttttccactacatcagtattcgcacacgcagactccagaccaagaaaagcccacagcgtcatagcgatggaagaacctaccgcactgaagaacggtgcatgatgcggattccaggaatcaacgtacagcgtcgggctaaaccagaaccagccaataatgcacagaccgacgaccggaataatgaccccccacacggtaatgctactgatttgcccggtaatgcgcgcaccaccaaagttagccacggtacaaatccacagcaccccgatggtcgcaagaccaatctgcactgggctcaaactcgcgccgagcagttcggtgccgtaaccaaccgcgctaatagcaatcgcgacgttagcaatcagcagactgacgccgtaggtatagttcgccataaagttaccggatttaccgaaagcatactcggcataaccgcccataccgccacttttacggctgaacataccgcattttgcgaatgcccatgccagtgccatactgcctacggctgtcaccagccaggagataatactgattgtcccgacttcggcaagctttgtcggcagcatgatgataccggagcccatcatgttgaccatcgtcagtatggttaactgaacgacgcccattttgttgcttttagcctgactcataatttttcccctttcaacagggtgctttgcgcatcacgaggcttgatgacatagcaccaaacttgcttacgaccatcatgttcttcgatatagacaccctgcagctccggtgcaaaacctggcagcaggttgatcccttcttccagagcgctgaagtaacgcagaacagcaccaccccagatttcacccggaacaacacacagcacacccggaggataaggaagcgcaccttcggcagcgatacggccttctgcatccggcagacgaaccagttccacttcaccgcgtaaataggcgtagttggcttcttgcggattcatgctgacgcgtgggaagtgctccttacggaacatctctttttgcagttgtttcacgttgtggcgggcatacaaatcatgcatttcctgacacaactgacgcagggtataaccggcgtagcgctcttcatgctgtttgtagatggaaggtagcacttctgctaatggcgcgtcggactcaagcagtttttcgaagcgtaccagcagggcaacaagttgctgaagtttggccatatcttctgccggagtcagcaggaagaggatggagttaagatcgcatttttccggcactacgccattttcgcgcaggaagttagcaagaatcgtcgcgggtacaccgaacgcttcatattcgccgttacgtgcatcaatacctggggttgtcagcaacagtttgcatggatcgacaaagtattgattctctgcatagccttcaaaagaatgccagtgttcccctggtacaaactggaagaagcgcagatcaaccgcaatttgcgctgtttcatagctctgccagggtttaccatccaccagttcaggtacgaacggacgaatatgctgacagttatcgaggatcagtttgcgggcattaatgccatttaccacacaatccatccacatattacgaccgctgacaccttcatgcattttggcgttgatattcagtgcggcaaacagcggatagaacgggctggtggaggcgtgcatcataaaggcgttgttcatgcgtttgtgcggtacataacgctgttgccctttgatgtggctgtcttttttatgaatttgactagtctgagaaaaaccagcctgttgtttatgcacagattgcgtaaccagaatacccggatcgttctcattaagatccagcaacagcgggctacagtccgccatcatcggaataaactgttcatagccgacccatgcactgtcaaacaggatgtagtcacacagatgaccaattttatccaccacttggcgggcgttataaatcgtaccgtcgtaggtgcctaactgaatcacagcgaggcggaaaggacgagcctcttttgcccgctgcggtgcgacttccgcgatcagctcacgcaggtaactttcttcaaaacagtgcgcatcaatgccaccgataaagccatacgggttacgtgccgtttccagataaaccggtgttgcaccagcctgtagcaacgctccgtggtggttagatttgtggttattgcgatcaaacagcaccagatcacccggtgttagcagggcgtttaaaaccactttgttagaagaactagtgccatttaaaacgaagtaggttttatcggcattaaacacttttgccgcatgttgctgtgcaatgcatggcgcgccttcgtgaatcagcagatcgcccatcgctacgtcggcgttgcacaagtcggcacggaacagcgcctcaccaaagtattccacaaactgattccccgccggatggcgacggaaaaattcgccgccctgatgaccagggcaatcaaacgcgctgttaccttgattgacataatcgaccagtgcgcggaagaaaggtgggcgcagttgagtttcataatggctggcagcggtttctaactggcgaccataaaattctcgtcggctttcgcaattctcaaagacaccgctaatacggggcaaatactctgcgggtacacgttcttgattttcagtagcaataaataccgggatgccataacccgtggcatcgatttcatcgagttttccgcatgtaacatcgttgaggcttaaaactattgccgccacatcgatattacgactttcattaatgtagatacattctcgctgcgtggtaaaacagtccgggcaagaatcactaaccgcaatttttaatttactcatttttcatctctttattttaggtaatagcaggtcctcaatttctcgaatgagaaatcgatcgtgccggaaaaaagcaaagttaccccgctgataaataaatcaggtagattgcttttttcagaatgcagaaacccttaccagtcaggtggctgataatacaagggttaacagagaatgagcactgcggaatacaggcatatgcctgtaatacagagagtcaggaagacctgtacgctgaagtgcccttagtcggtagactaacgggcattgaagaagtgaaagtcgaagctattgcgatgagcaaacttcataatatgagttgtccgccttatatggggcatagtgcggctgttattttccatttaatttacctttcctgatgtgaatgaaggtgaagatattctatccaggaaatacggttgaactgtgaaggtgatcaataaaaaatgatcaatcttaatttatttaatgatgagctttttactcagtaatataaaatattgaattgttatttttgtgtgttgtttaagataaaaagccgtatttattattacggctttaattaataaaaggcaggctgtattaaaattaatattcaaagcataaaccgatagccaataccggtttcagtaatgaaatggcgtgggcgggcgggatcctgttccagtttttgtcgcagatgtcccatataaatacgcaaatagtgactgtgttcgaccgcgtttggcccccacacctggttaaggagctggcgctgggtgagtacttttccggcattgttgagcagcaccgccagcaggcggaactcaattggtgtgagatgcacctcttcctcaccccggtgaatcacgcgggcggctaaatcgacggtaacatcggaaaattttaccagcggatcgggcgcggtggtggcagagtggcggcgtaatgcgacgcgcagacgggcctgcaattcgccaatgccaaacggcttactcagataatcatccgctccggcatccagcgcggcgattttgtcgctctcttcgctgcgtgcggaaagcacaatcaccggcaccgcgctccactggcgcaggtcgcggataaactcaatcccatcaccatcgggcaggccgagatcgagaataatcaaatctggcttacgggttgccgcttccagcaagccgcgttgcagcgtttcggcctcaaagacgcgcatcccgtcgccctccagcgccgtgcgcagaaagcgacgaatagcctgttcatcttcaacaatcagaacgtttgtcacatatcctcatgaaattcttcaagttcaggggcagtttgctggggaagtgtaacacgaaaacaggcaccaccttccggtcggttgaacgcggtaatagtgcccccgtgtacatccactatcgcccgacaaattgccagtccaagccctacccccggtactgcgctctctttattcccgcgagcaaacttatcaaatatcgtctgctcctggcctggcggaagaccggggccgttatcccagacatccagttgtagattttcgccctcaacgtgggcatcgataccaatttcggcctgcgcacccgcatatttcaccgcgttctccagcagattaatcagcacccgttcaaagagtggcccgtcaacgtggattaaggtcagcggttctggcagagaaagattgatggggctgcttaaacccggttccagcatttgcagcgcgctgccgactacttcttccagcgttaaccactctttcttcaaattaaagccgccggactgaattcgcgccatatccagtagattattcaccagtcgggtagtgttcagcacatgctgacggatctcgctggcctggcgggcgtggggacttccttcgcttgccagatcgagcgttaagatttctgcctgaccaaacagcaccgtaagcggcgtgcgtaaatcatggctaagcgccgccagcagggcgttgcggatctgttcacgttcgcttgccatccgcgcctgttcttcgctggcggttagcgtcagccgctcaagggcattggcgactaacagcgtaaacgtctccagcaggcgctgctgttccgggatcatcaactggcgcagattccccggctccaccaccaccagcccgtaggttttctcgccgctttttagcggcaaaatctggtacggtacaccgggtaacgtgtcggtgcccgcgcccgcaggcaggcctttatcaaaactccactgcgcgatggcatcgtcccacggcgtcattccttgcggatgtgttaacggctgcaatttaccgttgtcatcgggcaacaacacctgactgcgggcatgaaacgtggaggcaataaattgttcgctggtggcagcgatatcctgcggactgcggcccaccgccagagctttgctcatttcatataagtgccgtgtgcgttgctcgcggtaacgggctacccgcgcctgataacgcacgccagcagtaaggttcccgatcaccagcccgacggttaacatcaccgcgaaggtcagcagatattgcacatcagagacggcgagcgtgccgcgtggggcgataaaaaagagatcgaaactcactacattaatgacggtggcaaccacactaggccagcgtccataaaatagcgccaccaccaccacgccaagcagatacagcatcaccaggttggcggcatcaaacgccatcagccactgcatggcaattaaggtgataacggcgcataacgcggcggcaaccacgcatccctgaatttgtacacgccacttgtctttaaaagagcggttatccggcgcgttgttaatcgtgcgggcgggtggttcatcaagcgcgaccagcacctgatcgagatcgggggcgatgcgcgccagtcggtcagcaaacgtttcccgacgccaccagcggcggctggccgggcgaccgagaataatcttgccgagattatgttcacgggcataacgcactaccgctttctcttccgctggatcagaaagtgttgccgtctccgcgcccagttcctgcgccagacgtaaggcgctgagaattgcccgacgttttttttccggtaagcggtgcagggcaggggtttcaacatacaccgcgtgccagacgctacccagccgactcgccagccgcgccgctgcgcggaccagtttttcgctgccggtgttatggccgatgcataaaaggatcgcgtcgcgcgtgcgccacactttctcttcgccaggatgcccccgccaggcgcgcatttgctcatcaacgcgatcggcagtacggcgcagtgccagttcgcgcagggcgatcagattacctttgcggaaaaaatgttcaatggcgcgctccgcctgcccggcaatatagactttgccttctttcagccgctggcgcagatcgtccgggggcaagtccaccagcaccacgtcgtcggcggcatcgaaaaaaggatcgggcacggtttcccgtacctgaattccggtgacgccgctgaccacatcattcagactttccagatgctgaacgttgacggtagtgaaaacatcaatgccagcttccagcagttcttcgatatcctgccagcgtttgggatgacgggaacctggcgcattactgtgcgccagttcgtccattaagatcagcgccgggcggcgggcgagggcggcatcgagatcaaactcgctgatatgccgcccacggtacgcctggcgttttaacggcagaacagccagcccttccagcatggcggcggtatcttttcgcccgtgggtttctaccacgccaaccacaatatccagcccttgcgcccgcagtcgctgggcttctgccagcatcgcccaggtcttcccgacgcctgcacaggcaccgaagaaaactttcagcttcccccgatgcggcgcggcagtttgttccagcagacgatcggggtcgggacgtaagggttcgttattcatcaagtttatccagcgccagattgagttcaacaatgttgacaaccggctggccgatatatttcaccagcggttgttggctgtattttgcgatcagttgcgtgagctgttcaacgctgagattacgcgctttcgccacgcgtgggatttgccaggccgccgcttgcggggtgatattattgtccagcccgcttgcgcttgccgtcaccagttcaaccggaacgctcgcgctggcatccgggttagcggcccgtaatgcagcaacgcgtgcggctattagtttatccagctcagggttactgaccgccagattgctcccgccagaagcctgtggattatagggcatttctgccgttgcgctcgggcgaccatgaaaatagccgttgccggtaaaattctgcccgattaatgcgctaccgcgcaccgtatcaccttcacgaatcaagctaccattggcctgccagggaaaccaccattgccccagtacggtggtcagcagcgggtaaacgccgccagtaatcaataacagaaagataaatgtacttaatgccggacgtaatccactcatggtaaacctcacaccagaccgcaaacggtcagcagtaaatcaatgactttgataccgataaacggcaccagcagcccacccagaccgtaaatccataagttacggcgcaacatggcagaagcggtaagcggtttataactcacgccttttaacgccaggggaatcaaaaagacgataatcaaggcgttgaaaatcaccgcactgaggattgcggagtcggggctatgcaggcacatgatgttcagcgcatttaactgcggatacgttgccgcgaatgccgccggaataatggcgaagtatttcgccacatcgttggcaatgctgaaggtggtcaggctgccacgggtcatcagcatctgtttgccaatgtgcaccacctcgatcaacttggtcgggttagagtcgagatcgaccatattgcccgcctctttcgccgcctgggtgccggagttcatcgccaccgcgacatctgcctgcgccagcgccggagcatcgttggtgccgtcgccggtcatcgctaccaaacgaccttccgcctgatactgacggatcaatgccagcttggcctccggtgtcgcttcggcgagaaaatcatcgacacccgcttccgcagcaatcgcggcggcagtcagacggttatcgccggtaatcatcaccgttttaatgcccattttgcgcagctgggcgaagcgctctttaataccgcctttgacgatatctttcagcgcaataacgcccagcacacgagaaccttccaccaccaccagcggcgtggctccctgacgcgcaacctgatcgactttttgatcaacatcggtagggaagtgaccaccgttagcctcaacatggcgacgaatggcatcgacagaacctttacggatcatgcggttgtcgatgttgatcccgctcatccggctttgcgcagtaaacggtacaaaggtggcatggaggctctgcacatcgcgctcgcgcaggttaaaacgctgcttggcgaggatcacaatactgcggccttccggcgtttcatcagccaggctagccagttgtgcggcgtcagccagcgttttttcatccacgccctgcgcggggataaactcgctcgcctgacggttaccgagtgtgatggtgccggttttatccagtagcagaacgtcaacgtcacctgccgcttcaactgcacgtccgctggtggcaatcacattcgcgcctagcatccggctcatcccggcgacgccgatcgcactcaacaggccgccaatagtggttgggatcagacagaccagcagcgccaccagtaccgttacgctgactgcattaccgccccacgcggaaaacggccacagcgtggcggttgccagtaaaaagacgatagtcagggcaatcagcagaatggtcagggcaatttcgttcggcgttttgcgtcgctgtgcgccttccaccatcgcgatcatccgatccagaaatgtctcgccggggttaacgctacactcaatcaccagccagtcagaaagaatacgcgtgccgccggtgacggaggcaaaatcgccgccggattcacggatcaccggtgcgctttccccggtgatggcgctttcatcgacgcttgcacccccttcaataacttcaccatcgcaggggataatatcgccagcttctaccagtacgatatcgcctttacgaagttggtcggcaggaactttgtccgccgcagcgccatatttcggctcacgcagcttgcgggcaaaggcagtttttttcacccctttcagactgttggcctgcgctttactgcggccttctgccagcgcctcggcgaaattagcgaacagtacggtgatccacagccaaccgctaatggccgcgctaaacagcgcattgccgggcatcgcaccgcttgccatcgcgatgctaatacaggtggtcagcagactgccgatccagacgataaacatcaccggattgcgccattgcgcctgcgggtttaattttttcaccgcttctttcagcgcctgaacgacaagtgttggttcgaatagcgccagttgtttacgactcatattcagtgctcactcaatatcatcaggagagatattccgccaccggaccaagcgccagggcagggataaaggtcagtgcgccaaccagcaacacggtgccgattaacaggccaacaaacagcgggccgtgcgttggcagcgtgccggagctggcggcttggctctttttactcaccaggctaccggcaattgccatcaccgggataatcaccccgaagcgaccgacaaacatgcagaacgccagtaaacagttccagaacggagagttggcgcttaatccggcaaaggcgctgccgttgttgttagcggcggaactcacggcgtacagcacttcgctaaaaccatgcgggccagggttgagcatggcgctacgtccggcgtcggtcatcatcgccaacgccgcgcccatcagcaccagcgtcggggtaaccagaattgccagtgcagtcagtttcatctcgcgtacgtcgatttttttacccagatattccggtgtacgaccaatcatcagcccggcaataaacaccgccagcaggacaaacagcatcatgccgtaaagaccagaaccgacaccgccgaacaccacttcaccaatttgcatcagccacatcggcaccatgccaccgagagcggtaaagctatcatgcatcgcaatcaccgcgccacaggaagccgccgtcgtcacgaccgcaaacaggctactgaccagcacgccgaaacggctctctttaccttccatattgatgctgctgtccgtgcccagtgccagcagatgaggattaccctgaacttctgcccacatcaccacgcctacgcagatgacaaaaatcacactcatcgcccacagcaacatgcgcccctggcggcgatcgcccatcacttcaccaaaggcaaagcacagcgccgttgggatcaagaagatcgccagcatctgcacgaagttggtcagtgcggttgggttttcaaacggatggctgctgttggcattaaagaagccaccgccgttagtaccgagcatcttgatcgcttcctgagaagctacaggccccatgggtaacagctgttgcgctccttcaacggtattcacagcctgataaggcagaaagttttgcagcgcaccttgttgaataaaaaacagtgcaatcaacaacgccacagggactagcacccataacgtgatgcgtagcagatcgacccaggcattcccgagcgtgctcatgctctggcgggtaaacgcacggatgagggcaaaaatcaccgcaatcccgctggcggcagaaagaaagttttgcaccgttaagcccgccatctggctgaaatagctcaacgtggtttcaccgctataagattgccagttggtattggtgacaaagctgacggcggtattcagcgccagatcccagctcagccctggcaactgctgtggattaagcggcagatagtgctgaccgagcaacataaaaaacagcaccgccagccccagcatgttcaggccgagaatggcacaaagatattgcttccagttcatctcacggtcagagacgccaagtgcgcgaaaaagtacgcgctcaacgcccgttgtaccgggaagaggaatgtcattaatcagccgcgccagcccgctgcctaaaggacgcgccagcaccattaacaccagtaaaaacgtggcgatcagtaagaacccttgcgcagccatcagaacgcctccgcattgatcagggcataaaccagataacccagtaataaaaacaccagcaatacgccggttatcacgcctgcactcacagtgcacctccagtggcctaaaagtgataccggaagggtagaattctggctgcaaagatttcgcaaaaatctgcgggcggggtgtaaaaaaagtataaaaatggcaaaagccatgatttaactaatgtttagtattaatttaacttttgtgtaacttaattacaggatgaatgtaaataaaccatcaataagcaaaaataagtggtcggatgagtagtaaaattacacaaaaggcggtactattttcatcagataaacaaattcatttttccggtgccattcaccgggtagatacaaaagggggagaaaagtatggaactctacagagaatatcctgcatggcttatctttttacgccgtacttatgcggttgcagcgggcgttctggcgctgcctttcatgcttttctggaaagaccgcgcccgcttttacagctacctgcatcgcgtctggagcaaaaccagcgataaaccggtgtggatggatcaggccgaaaaggcaactggtgatttttattgattgctgagttttgaatacattgaacgtctacacttactcctgtaaaccgctcaggagcagtaatgaatctacaacgatttgatgacagcaccctaatccgtatctttgcccttcatgagttacatcgactgaaagaacatggcttaacgcgcggggcgcttctcgattatcacagccgctataaactcgtctttctggcgcattctcagccggagtaccgcaaacttggcccgttcgtggctgatattcaccagtggcaaaatctggatgactattacaaccagtaccgccaacgcgtagttgttttgctttctcaccccgccaacccgcgcgatcacaccaatgttttgatgcacgttcagggttattttcgcccgcatattgattccacagaacgccagcagctggctgcgcttatcgacagttatcgccgtggcgagcaaccacttcttgcgccgctgatgcgtatcaaacactatatggcgctttatcctgacgcctggcttagtgggcagcgttatttcgaactttggccgcgtgtgattaacttgcgccatagtggagttttatgactacccatctggtctggtttcgccaggatttacgtctgcacgataatctcgcactggctgccgcctgccgcaatagctctgcacgcgtgctggcgttgtatatcgctacaccacgccagtgggcgacgcataacatgagcccgcgtcaggctgaacttatcaatgctcaactgaatgggctacaaatagcgcttgcggaaaaaggtattcctttattgttccgtgaagtggatgactttgtcgccagtgtcgaaatagttaaacaggtgtgcgcggaaaacagcgttacccacctgttttataactatcagtatgaagtgaatgagcgggcgcgggatgtggaagttgaaagagcgctgcgtaacgtggtgtgtgaaggatttgatgacagcgtgatcctgccgcctggcgcggtgatgaccggtaatcacgagatgtacaaagtctttacgccttttaagaatgcctggctgaaacggctgcgggaagggatgccggagtgcgtcgctgcgccaaaagttcgtagtagcggaagcatagagcccagcccatccattacgctgaattatcctcgtcagtctttcgatactgcgcattttccggtggaagaaaaagcggcgattgcgcaattacgccagttttgccagaacggtgccggagaatatgagcaacaacgagattttccggcagtggaaggcaccagccgtttgagcgccagcctggcaacgggcgggttaagccctcgccagtgcttgcatcgcttgttggctgaacagccgcaggcgctggacggtggggccggtagtgtctggcttaatgagctgatctggcgcgagttttaccgtcacctgataacgtatcaccccagcttgtgtaaacatcgtccatttattgcctggacggatcgtgtacagtggcagagcaatcccgcacatttacaggcctggcaggaaggcaaaacgggatacccgattgttgatgccgctatgcgtcagcttaacagcactggctggatgcataacaggctacggatgattacagccagttttctggtgaaagatttattgatcgactggcgcgaaggcgagcgatatttcatgagccagctgattgatggtgatttggcagccaataacggtggctggcagtgggccgctagtaccggaaccgatgcagcgccgtattttcgtattttcaacccgacaacccagggcgagaaatttgatcatgagggcgagtttatccgccagtggctaccggaactgcgcgatgtgccagggaaagtggtgcatgagccgtggaagtgggcgcagaaagcaggtgtgacgctggattatccgcaaccgatagtcgagcacaaagaagcgagagtacaaacgttggcagcgtatgaggcggcgcggaaggggaaataacagacgcgtcaggcaatcgagcccagatgccggatgcggcgtgaacgccttatccagcctacaaatttgtgcaaattcaataaattgcaggaaatacgtaggcctgataagacgcgtcaagcgtcgcatcaggcatcggtgctggcctattaagactccagcgccagcgcgcggtttctgaatttcagcgcctgatacagccaaatcatcagtaccagtcctacacacgccagtgcgccccaggtaatttgatcaaatacttcaatatatgcattgatggagtagttgatcgccccggaagcatcaaagctagcctggcttgtctgatcggcaatcacgcccgccagatagttcgcgatcgcgccagaaagcagcatgtagatgccggttaatacgccggtcacaccggggatttcaatgcgcgtaatttggctcatggcaaccgggtcgataaacagttccgcaaagcccatcaccgccaggcctaataccatcagtggcagagaagagtgaccatacattgcggaccagcgggcgcttaaggtcagaatgcagaatccggcgctcatcaggccaaggccaagagcaaatttcccccagatgcgcacggtacgattacccgcgacactctcttttaccacccacgccaggaacacaccgcacagcataactgcgaaggcattaatgctctggaacatcgcggtcggaacggtataaccaaacatatcgcggttaacgaagcggtcgatataaaggctaatgctgctaccgccctgttgtgcgaaggcccagaacaacatactgaagaaggtgagcgtcacaatcagccccagctccttccgctgtttctggttttctgctttgcgataaatttttgccagtacacccaggccaataatagtcgcgacaattaaggcgtatacgctccactctttccagaacagtatggtaatcagtgcaggcgttgccaccagcagaaccagcagccatccccagttcggcaggagaaagtttgtcgcacgcagtacttttttgttaacgccgcgggtatgagtgaaatgacgattgccacataagaaaatgaccagacccgcgatcatgccaaccgccgccaggccaaagcccatcgcccagctgtactcttcctgggcgtaaccacaggcgataggtgcgataatagaccccacgttacccgccgcatacatcaggctgaaaccgccatcacgacgcggatcggttggctcatacagctcgccgagcagacagcttacgttagatttaaacaggccatagccgcagacgataatcgccagggacagatagaggaaactcggatggatctcactggcacccagcaccacatgaccgatcgccatcaacaacgcccccagcatcaccgccatgcgattgccgagaactttatccgccaaaaagccaccgaggattggcgtgacatacaccaggctacagtaggcgctaaataactcgtaggcgtgagtatcgttgtattttagttgattggtgagatagagaatcagcagggcacgcatgccgtaaaagctaaaatattcccagatttgcagcgcaacgacatagtaaatagcgcgcggctgacttgcgtgtttattcataataattccacaattgacggcaacgtcacgtaatagttgcgcggcgtgcttgtgtttccttaaagttaaaactttgatacagatctgattatttatgcaatatgctgtctgattgcataaatatacattagctgaagcgtgatgatataaacaatttgcgtcttttggcgtcgggtttgtttcttaatatgtcaaaagattggctatcgacgaactggcgaggtaacgctatgttaacggtgtagctatcagaatacggaaggcgcgaagatgaaaaacaccgaactggaacaactgattaacgaaaaactgaacagcgcggcgattagtgattacgcgccgaatggtttgcaggtggaaggcaaagagacggtgcaaaaaattgttaccggtgtcaccgccagccaggctttgctcgatgaggcagtgcgtctgggcgcggatgcggtcattgtgcatcatggctacttctggaaaggagagtctccggtcattcgcggaatgaagcgtaaccgtttaaaaacgttgctggcgaatgatatcaacctgtatggctggcatttgccgcttgacgcacatcctgagctgggcaataacgcacagctggcggcgttactggggatcacggtcatgggcgaaattgagccgttggtgccgtggggcgaactgaccatgcctgtgccgggactggagctggcttcctggattgaagcgcgtctgggacgtaagccgttatggtgtggcgataccggacctgaggtggtccagcgcgtcgcctggtgcacgggcggcgggcaaagttttatcgatagcgccgcgcgttttggcgtggatgcttttattactggcgaagtttctgaacagaccattcatagtgcccgcgagcagggattgcatttttatgctgcaggtcaccatgccactgaacgtggtggtattcgcgcattgagcgagtggctgaatgaaaataccgatcttgatgtgacctttattgatattcctaatcctgcataacgaataatcagagggatcgaaagtgcaacgagcgcgttgttatctgataggtgaaacggcggtagtgctggaactggaaccgccggtgacgctggctagccagaaacggatctggcgactggcgcagcgtctggtggatatgccgaatgtggttgaagccattcccggcatgaacaatatcacggtgattttgcgtaatcctgagagcctggcgctggatgccatagagcgtttgcaacgctggtgggaggagagcgaggcgctggagccggagtctcgctttattgaaattccggtggtttacggtggtgcaggcggaccggatttggcggtggtcgcggcgcattgcgggttgagcgaaaaacaggttgttgaattgcactcctccgtggaatacgtggtctggtttttaggttttcaaccgggcttcccgtatctcgggagtttgccggaacaactacacacgccacggcgcgctgaaccgcgcttactcgttccggcaggttctgtcgggatcggcgggccgcagactggtgtttatccgctggcaacgccgggtggctggcagttgattggtcataccagtctcagcctgtttgatccggcgcgtgacgaacccatcttattacgtccgggagacagcgtgcgctttgtaccgcagaaggagggagtatgctgaagattattcgtgcgggcatgtataccactgtgcaggatggcggtcgtcacggttttcgccagagcggtatcagccactgcggcgcactggatatgcccgcgttacgcattgctaacctactggtgggtaatgacgccaatgcccccgcgctggagatcacgctcggtcagttaactgttgagttcgaaactgatgggtggtttgctctgacgggtgccggttgcgaagcgcggctggatgataatgccgtctggaccggctggcgattgccgatgaaagcaggccagcgtttaacgcttaaacgcccgcagcacgggatgcgcagttatctggcggtcgcgggtggtattgatgttccgccggtaatgggcagttgcagcaccgatctcaaagtggggattggcgggctggaaggccgtttactgaaggatggtgaccgactcccgattggcaaaagcaagcgtgattctatggaagcgcagggcgttaaacagctgctgtggggcaaccgcattcgcgccttgccggggccggaatatcatgagttcgatcgcgccagccaggatgcattctggcgtagcccctggcagcttagcagccaaagtaaccgcatgggctatcgcttacaggggcaaattttaaaacgcaccaccgatcgcgaactgttatctcacggtttgttaccgggcgtggtgcaggtgccacataacgggcagccgattgtgttgatgaacgacgcacagaccaccggtggttacccgcgtattgcctgtatcattgaggctgatatgtaccatctggcgcaaattccgctcggtcagccgattcattttgtccagtgtagtctggaagaggcactaaaagcacggcaagatcagcaacgttattttgaacaattagcgtggcggctgcacaatgaaaattgacctgaacgccgatctgggcgaaggctgcgccagcgacgcagagctattaacgctggtttcctctgccaatattgcctgtggatttcatgcaggcgatgcgcaaatcatgcaggcttgcgtgcgtgaagcaataaaaaatggtgtcgcgattggcgctcacccgagttttcccgacagggaaaattttggtcgcagcgccatgcagctgccgccagaaaccgtttacgcccagacgctgtatcaaattggcgcgctggcaacgattgcccgtgcgcaaggcggcgtaatgcgtcatgtcaaaccgcacggcatgttgtacaaccaggcggcgaaagaagcacaactggcagacgccatcgccagagcggtatacgcttgcgatccagcattgattctcgtcgggctggcgggaagcgagctgattcgtgcaggcaagcaatatggtctgacaacgcgcgaggaagtgtttgccgatcgcggttatcaggctgacggcagcctggtgccgcgaagccagagtggcgcgttgattgaaaacgaagaacaggcgctggcgcaaacgctggagatggtgcaacacggcagagtcaaaagtatcaccggcgaatgggcaacggtcgcggcgcaaacggtctgcctgcatggcgacggcgagcacgcactggcgttcgcccgccgactacgctctgcatttgccgaaaaggggattgttgtcgcagcataaccccgattaataaagaatgaaaaaaggatatcaccatgcctgaaggcccggagatccgccgtgcagcggataacctggaggcggcgatcaaaggcaaaccactaactgatgtctggtttgccttcccgcagttaaaaccttatcaaagtcaacttatcggtcaacacgttacccatgtggaaacgcgtggtaaggcgttgttaactcatttttccaacgacttaacgctctacagccataatcagctttacggcgtctggcgcgtggttgataccggcgaagagccgcagaccacgcgagtattgcgggtaaaactgcaaacggctgacaaaaccattctgctttatagcgccagcgatattgagatgttgaccccggaacaactgaccacgcatccgtttttacaacgcgttggtcccgatgtgctggatccgaatctgacgccggaggtggtgaaagaacgattattgagcccgcgctttcgtaaccgtcagtttgctggattactgctcgatcaggcgtttctggctgggcttggcaattatttgcgggtggagatcctctggcaggttgggttgactggaaatcataaagcgaaagatctcaatgcggcgcaactggatgcactcgcacacgcgttactggagattcctcgattttcctacgctacgcgggggcaggtggatgagaataagcatcatggggcgctgtttcgctttaaggtttttcatcgagatggcgaaccgtgcgaacgttgtggcagcatcattgagaaaaccacgctgagttctcgcccgttttactggtgccctggctgccagcattaagcgctccgcttcggcgcataggtactaataaaccgcgcaatggcaggccctgtcagcaaaatactgaacaggcgtagggtttgcatcgccataatgagcgccatatcggcattgctccctgcggcgatgaccgccacggtatcaagcccgccggggctggtggcgaggtaggcagtcataaaatcaatgtgcataaaccgggtcagcccccacgccatacccgcacaaatagccagcagagcaaaaatgctcagcaggatttgcggtagcgggcgtagtgcccgcagtaagatttgtttatcgaaaccaagaccaatccgccagccaattgccatatacgccatcgccagcagccattccggtagttcgatggtgatgagctgaccagactggagcactgcgcccgccagcatcgggatgagcatcgtgccggaaggaagacgcagcaggcatcccactgtaccggcaacgaccgcgagcaaaatagtaagcaggagattaatgctcactggcgggaaccagacgatatgctggttaaccgcttcagcgttatcgcccagcatcatgcgggtgaccagaacagcggcccccgcgacgaacagcactcgcagatattgcataaacgccaccaggcgaatatctgcgccgtaatcttgcgccatagcgaccattgccgccgcgccgccaggagaggagccccaggcaccggtatttccaggcaaactgctatagcgcaccaataaccaacccacaatggcgctggaaagcagcgttaccagtaaaattgcaagcacgatcggccagttgacggccagggtggtgagaatgctaccagtgaggttttgcgcaatcatgcagccaagaatggcctgggcggcgagaaaagcagagcggggaagttgcagagtaattccgcgcatactaaagatgatcccggcgatcatcggcccaagtaatagcgccgccgggagatgtaccgcgaggaaaccaatagaaaggagaagacttagcacacataacattccccactgcaaaactggcatccttcgctccctcattattttctctttggtgtatcgatacagcataaagaaagctgggccaggaaaaaataacagcaatcaaggaaaaggggaaaatcagcaattttctgaaagagatgccctttccggcggcaaagggcatcatggtaaatcagttatagttaatcttaaaaagcaccactgtatcgaaggggccagcctcgatgggggtgcctggaatggagctaagttcagccgtataggttttttcgtagaccaacatgtcactggtgaaatcggcgtattcagcatatttattgaaggtataagggctggcgttttcatccagtaaacgtagcttcagaccattaccaatcaacaatgctttatcttcttcaaccaacgtttcttcggtataaaaggaggaactgactttaaatccgtcggtgcattgatcgttttggctcttggtcgttttaatactgaacgttttgctcattgtgtggcgacgtatatccagcaaattaaatttaccaaaatcaatcacctgtgtttccggactaatggaaaaattgacgctgcaatccagcacgcgaatgttttccagaccagtaatatgatatttcaggttttgggcagtagggtcttcgttaacgctaccggcaccgtcaaattgcacgacgatatagtcgctaagcgtactttgataatcatgcggcggcatttctcgtattttgacgtataaccgcatgcgagcgagaaaggtacggctcatatgaatattagcgggatcgccgctgcaaattttgttctgccatcccatcgcgatgatctgctcaggggtataaatatcaatgttcttactgtcgatacactggttagtgtcgatgcgactttttcccagactggcatcgtaatcgacaccgttgtatgtcacgccgagttgataataacgatcctgcacccccggataggggtttacccaggcgtagacatgctcgctttcaaagttgccgttggtattgttgtcacaatagacgggaattttaatatcgtcagattcccagatcttatcaccgggtttggcattgcctggtacagcaaacggttgaatcgcttcacttttttctactgcgccaccagatgtaccaaaatagcagttcagcgccattgcagacttcaacggcagaaataacaggcagatgacgagcaacaatcccttgccagcactcatttcgcctccactgcttgtaaacggcattgtccgctgcagttgagcgtcgtcatgcgtaatgcgccgtaatcatccatgtaaccgagataaaactggctgccgctataacttccggtgtttgtgttgaccgtactaaaaggtgcaaccatcacggttttgaagcctgggagaacgcctttttcatttctccccagataggcaatggtcagataatacgcggtaggatttttcagtgtcagttggttgccctgctggctgacctgtaactgcagttcgaccttttctcctgctttcttgcgtaatgcagccggtcgccagaacaatttaatacgactttgaatagcgacctgaagtatcgcatggtcgctgcttttatccggagcgggaggaatttcgcgcatattgtagaaaaatagcgtttcgcgatcgccaggtaattgtgtggtactggcttgtttcacaacccgcacctggcttgtcgctttcggttccagacgttgaatagggggcaaagcgaccagaagagcatcgcttttctcccctttttcattttctatccaggaataagcaagataaggcagtttgtcactttggttttcgatacgcaggctggtggctttgtcattggcgttaaacacaatgcgtgtgcgatcgggttgcaccgcagcattgcaacccaagctgatggttaacaacattaagggtaatcctttaataaatgtcattctcttttccttaattaatgacaaggtaaaatcaggcgtttggtcgtgtcttccagacgttctggcagatgaataatgcagctttgctcaccccagaccacggtaaacagttgattttcagcgacaccgcttaaccaggcatgtccttcctcgccaaccatacccacgctaatgccgctgtcatcctggcggatatccgcaccgaggggagggaactgaccgctggcgttgcgtatgatgacgttaacgtctttaccggaacgggaagccagacttttgtaacctatcgcgccttcaatccatgtttccttgatgacgttttctgcaactgttacgccgtcgggtaagtcattcatgttcaccgccacggtggaaggctggtaactggaaatcaacggcaccaccgcaatgccaaaatggttggtgtagtcgagattgccctgaaccggaatatctgccacgccatcggtgctgaccatcaggcgtggttcattggtggagctgcggcgatgaaatgctgcaccatattgggttgcggtgaaagaaccgctccagctgctgctgacggaactgtaatcactggcggcataggtaccagaaatatcccactcacccgcactactcaggtgctgatagttaccgctcacctgggctccattgtccggacgatcggattgcagtccggcagacatgccccagctattacgttcatccagcgtatcgttccagctcatgcggtgtatggtgctgtggctactgttttgcatgtcatagccaacccgaccaccgttaccgaaggggaggctaatgctcagataaatctggttgtcgcgatctttatcttcgtagtgggtcgtattgaaactcgtgctaatgctgatatctctccagtcaccaatatcaacattaaaacctgctgtgatgttggcggtcgtggaggcgtctgcattccaccaggtttgatgtagcaggttggcgtaaagattgaggtttagtggggtaatcggttggcccacggataagctgatcgtctgtttttcgtcctgcgcatcgctgtcgttgtatttgtgatccagatagttggcgtagctgtgaaaatgacgatcactgaagcgataagcggcgaggctaatcgtgctgttggtggcatccacttgtttgctgtaattaaaacggtagcttaagccccgctcgtcctgctgagtatcaaaatggctactggcccaggtgacatcaaaggacagtgcgccaagccacagcatattttgcccgatacccattgcggcagaatggtagtcatcatcagaaatcagcaggccgccgtacaggctggtgttactgagcatcccccaggaaacttcattgctaaaaaaggtttcattttcagtttgatgactcatggaaggccgtggctgacccgcggccaatttatagcgaacctgtccctggcgagtcaggaagggcgtgcttgctgcgctaacctggaaattgttcacccgaccatcttcttccgtcactttgacatccagcgtgccctgaacagactgattgaggtcatcaataataaacgggcctggcgggacttttttctggtaaatgacgcggccactttgactgatcgtcaccgtggcattggtctgtgcaataccgctaatttgtggggcgtagccacgcagctcccacggtaacattcgatcgtcactcgccagtgccgcgccggtataagaaaaaccatcgaaaatattggaactgaaatcggtttcgccgagggttaacttagagcctaattgcggtaatggacgaaaaagataggtgcggcttattccgccactctggtcatggttatcttcgctatcggtcttattaagctggtaatcactgcgtaagcgccatgccccggcgttaattccggcggtaccgtaggcattcaggttagtgctgctgctgccgtcctgtgggcggtagctgctggcaaacaagttgtaatccatcaggacaccggcaacaccttctttccatgtagaggggggagcccagttttcactgtgccacgccagccaggcttgcggaatactaatattcagttgctgattggcttgatcgaaattgaagagcatttcaggtcgggaactgaaatcaatacaccgatctatctgtggcaaggactgacggacatctggttttaaaccaaatttatcgaccagactatcattgatgcatggaatggttttgtcaccctttttttgccagttaattttttgcccattactgattttgttgttattcaccgcaacgctaacaaaatattcaccgggagcaatgactcctttttcctttaataaactaatatcaatgcggtcgcgcatacttttatcgagaacattcagattgaattcgaccgccattgcgcaaggcatcgccatgaccaggcaggatacaaaagagagtcgataaatattcacggtgtccatacctgataaatattttatgaaaggcggcgatgatgccgccaaaataatacttatttataatccagcacgtaggttgcgttagcggttacttcacctgccgtgacatcgactgcattatcaatttgttccatccaggcgaaaaagttcagcgtctgttcactactgcttgcatccaggtcaagatctggcgcggcactacctaatacgatgttaccgtcatttttgtccatcagtcgtacaccgaccccagttgcttcgcctgcactggtgttgctcaacaaaggcgtagcaccagttgtcttagccgtgctatcgaaggttacgccaactttggataccggcattccgctaccgttgtcagaagcaggcagatcacagttgatcaagcgaatgtcgacggccactttattgctatgatgctcccggtttatatgggttgtcgtgacttgtccaagatctatgtttttatcaatatcttctggatgaatttcacaaggtgcttcaataacctcccccttaaagtgaatttcgccagaaccttcatcagcagcataaacaggtgcagtgaacagcagagatacggccagtgcggccaatgttttttgtcctttaaacataacagagtcctttaaggatatagaataggggtatagctacgccagaatatcgtatttgattattgctagtttttagttttgcttaaaaatattgttagttttattaaatgcaaaactaaattattggtatcatgaatttgttgtatgatgaataaaatataggggggtatagatagacgtcattttcatagggttataaatgcgactaccatgaagtttttaattgaaagtattgggttgctgataatttgagctgttctattctttttaaatatctatataggtctgttaatggattttatttttacaattttttgtgtttaggcatataaaaatcaacccgccatatgaacggcgggttaaaatatttacaacttagcaatcaaccattaacgcttgatatcgcttttaaagtcgcgtttttcatatcctgtatacagctgacgcggacgggcaatcttcataccgtcactgtgcatttcgctccagtgggcgatccagccaacggtacgtgccattgcgaaaatgacggtgaacatggaagacggaatacccatcgctttcaggatgataccagagtagaaatcgacgttcgggtacagtttcttctcgataaagtacgggtcgttcagcgcgatgttttccagctccatagccacttccagcaggtcatccttcgtgcccagctctttcagcacttcatggcaggtttcacgcattacggtggcgcgcgggtcgtaatttttgtacacgcggtgaccgaagcccatcaggcggaaagaatcatttttgtctttcgcacgacgaacaaattccggaatgtgtttaacggagctgatttcttccagcattttcagcgccgcttcgttagcaccgccgtgcgcaggtccccacagactagcaatacctgctgcgatacaggcaaacgggttcgcaccgctagagccagcggtacgcacggtggaggtagaggcgttctgttcatggtcagcgtgcaggatcagaatacggtccatagcacgttccagaatcggattaacttcatacggttcgcacggcgtggagaacatcatattcaggaagttaccggcgtaggagagatcgttgcgcgggtaaacaaatggctgaccaatggaatacttgtaacacatcgcggccatggtcggcattttgctcagcaggcggaacgcggcaatttcacggtgacgaggattgttaacatccaggctgtcgtgatagaacgccgccagcgcgccggtaataccacacatgactgccattggatggctgtcgcgacggaaagcatggaacagacgggtaatctgctcgtggatcatggtatgacgggtcaccgtagttttaaattcgtcatactgttcctgagtcggtttttcaccattcagcaggatgtaacaaacttccaggtagttagaatcggtcgccagctgatcgatcgggaaaccgcggtgcagcaaaataccttcatcaccatcaataaaagtaattttagattcgcaggatgcggtactagtgaagcctgggtcaaaggtgaacacacctttactaccgagagtacggatatcaataacatcttgacccagcgtgcctttcagcacatccagttcaacagctgtatccccgttgagggtgagttttgcttttgtatcagccatttaaggtctccttagcgccttattgcgtaagactgccggaacttaaatttgccttcgcacatcaacctggctttacccgttttttatttggctcgccgctctgtgaaagaggggaaaacctgggtacagagctctgggcgcttgcaggtaaaggatccattgatgacgaataaatggcgaatcaagtacttagcaatccgaattattaaacttgtctaccactaataactgtcccgaatgaattggtcaatacttccacactgttacataagttaatcttaggtgaaataccgacttcataacttttacgcattatatgcttttcctggtaatgtttgtaacaactttgttgaatgattgtcaaattagatgattaaaaattaaataaatgttgttatcgtgacctggatcactgttcaggataaaacccgacaaactatatgtaggttaattgtaatgattttgtgaacagcctatactgccgccaggtctccggaacaccctgcaatcccgagccacccagcgttgtaacgtgtcgttttcgcatctggaagcagtgttttgcatgacgcgcagttatagaaaggacgctgtctgacccgcaagcagaccggaggaaggaaatcccgacgtctccaggtaacagaaagttaacctctgtgcccgtagtccccagggaataataagaacagcatgtgggcgttattcatgataagaaatgtgaaaaaacaaagacctgttaatctggacctacagaccatccggttccccatcacggcgatagcgtccattctccatcgcgtttccggtgtgatcacctttgttgcagtgggcatcctgctgtggcttctgggtaccagcctctcttcccctgaaggtttcgagcaagcttccgcgattatgggcagcttcttcgtcaaatttatcatgtggggcatccttaccgctctggcgtatcacgtcgtcgtaggtattcgccacatgatgatggattttggctatctggaagaaacattcgaagcgggtaaacgctccgccaaaatctcctttgttattactgtcgtgcttagtcttctcgcaggagtcctcgtatggtaagcaacgcctccgcattaggacgcaatggcgtacatgatttcatcctcgttcgcgctaccgctatcgtcctgacgctctacatcatttatatggtcggttttttcgctaccagtggcgagctgacatatgaagtctggatcggtttcttcgcctctgcgttcaccaaagtgttcaccctgctggcgctgttttctatcttgatccatgcctggatcggcatgtggcaggtgttgaccgactacgttaaaccgctggctttgcgcctgatgctgcaactggtgattgtcgttgcactggtggtttacgtgatttatggattcgttgtggtgtggggtgtgtgatgaaattgccagtcagagaatttgatgcagttgtgattggtgccggtggcgcaggtatgcgcgcggcgctgcaaatttcccagagcggccagacctgtgcgctgctctctaaagtcttcccgacccgttcccataccgtttctgcgcaaggcggcattaccgttgcgctgggtaatacccatgaagataactgggaatggcatatgtacgacaccgtgaaagggagcgactatatcggtgaccaggacgcgattgaatatatgtgtaaaaccgggccggaagcgattctggaactcgaacacatgggcctgccgttcagccgtctcgatgatggtcgtatctatcaacgtccgtttggcggtcagagcaaaaacttcggcggcgagcaggcggcacgcactgcggcagcagctgaccgtaccggtcacgcactgttgcacacgctttatcagcagaacctgaaaaaccacaccaccattttctccgagtggtatgcgctggatctggtgaaaaaccaggatggcgcggtggtgggttgtaccgcactgtgcatcgaaaccggtgaagtggtttatttcaaagcccgcgctaccgtgctggcgactggcggagcagggcgtatttatcagtccaccaccaacgcccacattaacaccggcgacggtgtcggcatggctatccgtgccggcgtaccggtgcaggatatggaaatgtggcagttccacccgaccggcattgccggtgcgggcgtactggtcaccgaaggttgccgtggtgaaggcggttatctgctgaacaaacatggcgaacgttttatggagcgttatgcgccgaacgccaaagacctggcgggccgtgacgtggttgcgcgttccatcatgatcgaaatccgtgaaggtcgcggctgtgatggtccgtgggggccacacgcgaaactgaaactcgatcacctgggtaaagaagttctcgaatcccgtctgccgggtatcctggagctttcccgtaccttcgctcacgtcgatccggtgaaagagccgattccggttatcccaacctgtcactacatgatgggcggtattccgaccaaagttaccggtcaggcactgactgtgaatgagaaaggcgaagatgtggttgttccgggactgtttgccgttggtgaaatcgcttgtgtaagcgtacacggcgctaaccgtctgggcggcaacagcctgctggacctggtggtctttggtcgcgcggcaggtctgcatctgcaagagtctatcgccgagcagggcgcactgcgcgatgccagcgagtctgatgttgaagcgtctctggatcgcctgaaccgctggaacaataatcgtaacggtgaagatccggtggcgatccgtaaagcgctgcaagaatgtatgcagcataacttcagcgtcttccgtgaaggtgatgcgatggcgaaagggcttgagcagttgaaagtgatccgcgagcgtctgaaaaatgcccgtctggatgacacttccagcgagttcaacacccagcgcgttgagtgcctggaactggataacctgatggaaacggcgtatgcaacggctgtttctgccaacttccgtaccgaaagccgtggcgcgcatagccgcttcgacttcccggatcgtgatgatgaaaactggctgtgccactccctgtatctgccagagagcgaatccatgacgcgccgaagcgtcaacatggaaccgaaactgcgcccggcattcccgccgaagattcgtacttactaatgcggagacaggaaaatgagactcgagtttagtatttatcgctataacccggatgttgatgatgctccgcgtatgcaggattacaccctggaagcggatgaaggtcgcgacatgatgctgctggatgcgcttatccagctaaaagagaaagatcccagcctgagcttccgccgctcctgccgtgaaggtgtgtgcggttccgacggtctgaacatgaacggcaagaatggtctggcctgtattaccccgattagcgcactcaaccagccgggcaagaagattgtgattcgcccgctgccaggtttaccggtgatccgcgatttggtggtagacatgggacaattctatgcgcaatatgagaaaattaagccttacctgttgaataatggacaaaatccgccagctcgcgagcatttacagatgccagagcagcgcgaaaaactcgacgggctgtatgaatgtattctctgcgcatgttgtagtacctcttgtccgtctttctggtggaatcccgataagtttatcggcccggcaggcttgttagcggcatatcgtttcctgattgatagccgtgataccgagactgacagccgcctcgacggtttgagtgatgcattcagcgtattccgctgtcacagcatcatgaactgcgtcagtgtatgtccgaaggggctgaacccgacgcgcgccatcggccatatcaagagcatgttgttgcaacgtaatgcgtaaaccgtaggcctgataagacgcgcaagcgtcgcatcaggcaaccagtgccggatgcggcgtgaacgccttatccggcctacaagtcattacccgtaggcctgataagcgcagcgcatcaggcgtaacaaagaaatgcaggaaatctttaaaaactgcccctgacactaagacagtttttaaaggttccttcgcgagccactacgtagacaagagctcgcaagtgaaccccggcacgcacatcactgtgcgtggtagtatccacggcgaagtaagcataaaaaagatgcttaagggatcacgatgcagaacagcgctttgaaagcctggttggactcttcttacctctctggcgcaaaccagagctggatagaacagctctatgaagacttcttaaccgatcctgacagcgttgacgctaactggcgtaacacgttccagcagttacctggtacgggagtcaaaccggatcaattccactctcaaacgcgtgaatatttccgccgcctggcgaaagacgctagtcgttactctagtacgatctccgaccctgacaccaatgtgaagcaggttaaagtcctgcagctcattaacgcataccgcttccgtggtcaccagcatgcgaatctcgatccgctgggactgtggcagcaagataaagtggccgatctggatccgtctttccacgatctgaccgaagcagacttccaggagaccttcaacgtcggtagttttgccagcggcaaagaaaccatgaaactcggcgagctgctggaagccctcaagcaaacctactgcggcccgattggtgccgagtatatgcacattaccagcaccgaagaaaaacgctggatccaacagcgtatcgagtctggtcgcgcgactttcaatagcgaagagaaaaaacgcttcttaagcgaactgaccgccgctgaaggtcttgaacgttacctcggcgcaaaattccctggcgcaaaacgcttcagcctggaaggcggtgacgcgttaatcccgatgcttaaagagatgatccgccacgctggcaacagcggcacccgcgaagtggttctcgggatggcgcaccgtggtcgtctgaacgtgctggtgaacgtgctgggtaaaaaaccgcaagacttgttcgacgagttcgccggtaaacataaagaacacctcggcacgggtgacgtgaaataccacatgggcttcagctctgacttccagaccgatggcggcctggtgcacctggcgctggcgtttaacccgtctcaccttgagattgtaagcccggtagttatcggttctgttcgtgcccgtctggacagacttgatgagccgagcagcaacaaagtgctgccaatcaccatccacggtgacgccgcagtgaccgggcagggcgtggttcaggaaaccctgaacatgagcaaagcgcgtggttatgaagttggcggtacggtacgtatcgttatcaacaaccaggttggtttcaccacctctaatccgctggatgcccgttctacgccgtactgtactgatatcggtaagatggttcaggccccgattttccacgttaacgcggacgatccggaagccgttgcctttgtgacccgtctggcgctcgatttccgtaacacctttaaacgtgatgtcttcatcgacctggtgtgctaccgccgtcacggccacaacgaagccgacgagccgagcgcaacccagccgctgatgtatcagaaaatcaaaaaacatccgacaccgcgcaaaatctacgctgacaagctggagcaggaaaaagtggcgacgctggaagatgccaccgagatggttaacctgtaccgcgatgcgctggatgctggcgattgcgtagtggcagagtggcgtccgatgaacatgcactctttcacctggagcccgtacctcaaccacgaatgggacgaagagtacccgaacaaagttgagatgaagcgcctgcaggagctggcgaaacgcatcagcacggtgccggaagcagttgaaatgcagtctcgcgttgccaagatttatggcgatcgccaggcgatggctgccggtgagaaactgttcgactggggcggtgcggaaaacctcgcttacgccacgctggttgatgaaggcattccggttcgcctgagcggtgaagactccggtcgcggtaccttcttccaccgccacgcggtgatccacaaccagtctaacggttccacttacacgccgctgcaacatatccataacgggcagggcgcgttccgtgtctgggactccgtactgtctgaagaagcagtgctggcgtttgaatatggttatgccaccgcagaaccacgcactctgaccatctgggaagcgcagttcggtgacttcgccaacggtgcgcaggtggttatcgaccagttcatctcctctggcgaacagaaatggggccggatgtgtggtctggtgatgttgctgccgcacggttacgaagggcaggggccggagcactcctccgcgcgtctggaacgttatctgcaactttgtgctgagcaaaacatgcaggtttgcgtaccgtctaccccggcacaggtttaccacatgctgcgtcgtcaggcgctgcgcgggatgcgtcgtccgctggtcgtgatgagcccgaaatccctgctgcgtcatccgctggcggtttccagcctcgaagaactggcgaacggcaccttcctgccagccatcggtgaaatcgacgagcttgatccgaagggcgtgaagcgcgtagtgatgtgttctggtaaggtttattacgacctgctggaacagcgtcgtaagaacaatcaacacgatgtcgccattgtgcgtatcgagcaactctacccgttcccgcataaagcgatgcaggaagtgttgcagcagtttgctcacgtcaaggattttgtctggtgccaggaagagccgctcaaccagggcgcatggtactgcagccagcatcatttccgtgaagtgattccgtttggggcttctctgcgttatgcaggccgcccggcctccgcctctccggcggtagggtatatgtccgttcaccagaaacagcaacaagatctggttaatgacgcgctgaacgtcgaataaataaaggatacacaatgagtagcgtagatattctggtccctgacctgcctgaatccgtagccgatgccaccgtcgcaacctggcataaaaaacccggcgacgcagtcgtacgtgatgaagtgctggtagaaatcgaaactgacaaagtggtactggaagtaccggcaagtgcagacggcattctggatgcggttctggaagatgaaggtacaacggtaacgtctcgtcagatccttggtcgcctgcgtgaaggcaacagcgccggtaaagaaaccagcgccaaatctgaagagaaagcgtccactccggcgcaacgccagcaggcgtctctggaagagcaaaacaacgatgcgttaagcccggcgatccgtcgcctgctggctgaacacaatctcgacgccagcgccattaaaggcaccggtgtgggtggtcgtctgactcgtgaagatgtggaaaaacatctggcgaaagccccggcgaaagagtctgctccggcagcggctgctccggcggcgcaaccggctctggctgcacgtagtgaaaaacgtgtcccgatgactcgcctgcgtaagcgtgtggcagagcgtctgctggaagcgaaaaactccaccgccatgctgaccacgttcaacgaagtcaacatgaagccgattatggatctgcgtaagcagtacggtgaagcgtttgaaaaacgccacggcatccgtctgggctttatgtccttctacgtgaaagcggtggttgaagccctgaaacgttacccggaagtgaacgcttctatcgacggcgatgacgtggtttaccacaactatttcgacgtcagcatggcggtttctacgccgcgcggcctggtgacgccggttctgcgtgatgtcgataccctcggcatggcagacatcgagaagaaaatcaaagagctggcagtcaaaggccgtgacggcaagctgaccgttgaagatctgaccggtggtaacttcaccatcaccaacggtggtgtgttcggttccctgatgtctacgccgatcatcaacccgccgcagagcgcaattctgggtatgcacgctatcaaagatcgtccgatggcggtgaatggtcaggttgagatcctgccgatgatgtacctggcgctgtcctacgatcaccgtctgatcgatggtcgcgaatccgtgggcttcctggtaacgatcaaagagttgctggaagatccgacgcgtctgctgctggacgtgtaatagtttaagtttcacctgcactgtagaccggataaggcattatcgccttctccggcaattgaagcctgatgcgacgctgacgcgtcttatcaggcctacgggaccaccaatgtaggtcggataaggcgcaagcgccgcatccgacaagcgatgcctgatgtgacgtttaacgtgtcttatcaggcctacgggtgaccgacaatgcccggaagcgatacgaaatattcggtctacggtttaaaagataacgattactgaaggatggacagaacacatgaacttacatgaatatcaggcaaaacaactttttgcccgctatggcttaccagcaccggtgggttatgcctgtactactccgcgcgaagcagaagaagccgctagtaaaatcggtgccggtccgtgggtagtgaaatgtcaggttcacgctggtggccgcggtaaagcgggcggtgtgaaagttgtaaacagcaaagaagacatccgtgcttttgcagaaaactggctgggcaagcgtctggtaacgtatcaaacagatgccaatggccaaccggttaaccagattctggttgaagcagcgaccgatatcgctaaagagctgtatctcggtgccgttgttgaccgtagttcccgtcgtgtggtctttatggcctccaccgaaggcggcgtggaaatcgaaaaagtggcggaagaaactccgcacctgatccataaagttgcgcttgatccgctgactggcccgatgccgtatcagggacgcgagctggcgttcaaactgggtctggaaggtaaactggttcagcagttcaccaaaatcttcatgggcctggcgaccattttcctggagcgcgacctggcgttgatcgaaatcaacccgctggtcatcaccaaacagggcgatctgatttgcctcgacggcaaactgggcgctgacggcaacgcactgttccgccagcctgatctgcgcgaaatgcgtgaccagagccaggaagatccgcgtgaagcacaggctgcacagtgggaactgaactacgttgcgctggacggtaacatcggttgtatggttaacggcgcaggtctggcgatgggtacgatggacatcgttaaactgcacggcggcgaaccggctaacttccttgacgttggcggcggcgcaaccaaagaacgtgtaaccgaagcgttcaaaatcatcctctctgacgacaaagtgaaagccgttctggttaacatcttcggcggtatcgttcgttgcgacctgatcgctgacggtatcatcggcgcggtagcagaagtgggtgttaacgtaccggtcgtggtacgtctggaaggtaacaacgccgaactcggcgcgaagaaactggctgacagcggcctgaatattattgcagcaaaaggtctgacggatgcagctcagcaggttgttgccgcagtggaggggaaataatgtccattttaatcgataaaaacaccaaggttatctgccagggctttaccggtagccaggggactttccacagtgaacaggccattgcatacggcactaaaatggttggcggcgtaaccccaggtaaaggcggcaccacccacctcggcctgccggtgttcaacaccgtgcgtgaagccgttgctgccactggcgctaccgcttctgttatctacgtaccagcaccgttctgcaaagactccattctggaagccatcgacgcaggcatcaaactgattatcaccatcactgaaggcatcccgacgctggatatgctgaccgtgaaagtgaagctggatgaagcaggcgttcgtatgatcggcccgaactgcccaggcgttatcactccgggtgaatgcaaaatcggtatccagcctggtcacattcacaaaccgggtaaagtgggtatcgtttcccgttccggtacactgacctatgaagcggttaaacagaccacggattacggtttcggtcagagcacctgtgtcggtatcggcggtgacccgatcccgggctctaactttatcgacattctcgaaatgttcgaaaaagatccgcagaccgaagcgatcgtgatgatcggtgagatcggcggtagcgctgaagaagaagcagctgcgtacatcaaagagcacgttaccaagccagttgtgggttacatcgctggtgtgactgcgccgaaaggcaaacgtatgggccacgcgggtgccatcattgccggtgggaaagggactgcggatgagaaattcgctgctctggaagccgcaggcgtgaaaaccgttcgcagcctggcggatatcggtgaagcactgaaaactgttctgaaataaatatctgtaataagaaatagccctcgccgcttccctctacaggaatggcgaagggctgtcggtttcgacatggttggccatcgtatgatggccttttttgtgcttatcggctactttttcgctgcgctatcagggtaaatttatagtcatcggtattaaaagcgttgcggctatattcaaacacccgaccatcaactaaatatccacggcttactttttcaagaatcggctttgtctggctgatattaagcagacggctcatctcttcggttggcatcagaggaatgatttcctgttcgctacgatcgataaccattttcttcacttcttcgataaagtgatatttgctattttccatgacctgccaggtgagatccgggaacaacgcaagcggcatccaggtttcttccagcgccattggcttttgcttgcgatagcgcacgcgcttcacatgccacacacgatcctgcggggtgatttgtagctgttgctgaagaaaatcgtcagccggaatcacttcgaatatcagaacttcactgtgtgtatcgacgtgacggtcgctcagtttttcatcaaaactggttaactgaaaaatatcgtaattgacccgctcttctttgacgtaagtcccgctgccctgaatgctttcgaggatctgctgctcgactagctggcgcaaagcctgacgcaccgtaacccggctgacgccaaactctgtttgtagcgcactttcagtgggtaacgcatcgccaggtttaagctcgccacgcgcaatttgttcacgaatgcgatcggcaatctgccggtataagggcttgtgtcccatttttagtatctcattaatacgaatttaaccattatgcccgataaattcatcctgtaaataatacaaatacaatacaaataatttcaatcaagtgaaattgatcacataatggtattgttttatcgggcacactggcgcgactataaaaacgatcaagtgaggatcatgatgaatctgacgactctgacccaccgcgatgcgttgtgtctgaatgcgcgctttaccagccgtgaagaggccatccacgcgttgactcaacgtcttgctgctctggggaaaatttccagtactgagcaatttctggaagaagtgtatcgccgtgaaagccttggcccgaccgccttaggtgaagggttggctgtgccgcatggcaaaactgctgcggtaaaagaagcggcgtttgcggtcgccacactcagcgagccgcttcagtgggaaggcgttgatggcccggaagcagttgatttagtggtgctgctggcgattccccccaatgaagcgggtactacgcatatgcaactgctgacagcgctgaccacgcgccttgcggatgatgagattcgggcgcgtatacagagcgcgacgacgcctgatgagttgctcagcgcgctggatgacaagggaggcacgcaaccttctgcctctttttccaacgcgccaactatcgtctgcgtaacggcctgtccggcgggtattgctcacacctatatggctgcggaatatctggaaaaagccggacgcaaactcggcgtaaatgtttacgttgaaaaacaaggcgctaacggcattgaagggcgtttaacggcggatcaactcaatagtgcaaccgcctgtatttttgcggctgaagtcgccatcaaggagagtgagcgttttaatggcattcccgcgcttagtgtgcctgttgccgagccgattcgccatgcagaagcgttgatccaacaagcgcttaccctcaagcgtagcgatgagacgcgtaccgtacagcaagatacgcaaccggtgaaaagtgtcaaaacggagctgaaacaggcactgttgagcggaatctcttttgccgtaccgttgattgtcgcggggggcacggtgctggcggtcgcggtattactgagccaaatcttcgggctacaagatctgtttaatgaagaaaactcctggctgtggatgtaccgcaagctgggcggcgggctgctcggaattttgatggtaccggtgctcgcggcctataccgcctattctctggcagataaaccggcgttagcgccaggctttgcggctggacttgccgccaacatgatcggctccgggtttctcggcgcggtcgttggcggattgatagccggttacttgatgcgctgggtgaaaaatcacttgcgtcttagcagtaaattcaatggattcctgactttttatctctacccggtgctcggtacgttgggagcgggcagtctgatgctgtttgtggtgggggaacctgtcgcctggatcaataacagccttaccgcctggctgaacggtctgagtggaagtaacgcgctgttgctgggtgccattctcggttttatgtgttcctttgaccttggagggccagtgaataaagccgcttatgcattctgcctgggcgcaatggcgaacggcgtttacggcccgtatgccattttcgcctccgtcaaaatggttagcgcatttaccgtaaccgcttccacgatgctcgcaccgcgcctgtttaaagagtttgaaattgagaccgggaaatccacctggctgttagggctggcaggtattaccgaaggggcgatcccgatggcgattgaagatccgctgcgggttattggtagctttgtgctgggctctatggtaacgggcgctattgtcggtgcgatgaatatcggccttagcacacccggtgccggcattttcagcctctttttacttcatgataatggcgcgggcggtgttatggcggcaattggctggtttggcgcggcattggtgggggctgcaatcagcactgcaattctcctgatgtggcggcgtcacgcggttaagcatggcaactatctgactgatggcgtaatgccataaacaaaaaggaaacgacgatgaaagcagtatctcgcgttcacatcaccccgcatatgcactgggatcgagagtggtatttcaccaccgaagagagtcgtattctgctggtcaataatatggaagagatcctgtgccgactggaacaggacaacgaatacaaatattacgtactcgacgggcaaacggcgatcctcgaagattatttcgcggtgaaaccggaaaacaaagaccgtgtgaagaaacaggtagaagccggcaagttgattatcggcccctggtatacccagaccgataccacgattgtttctgcggaatccatcgtccgtaatctgatgtacggaatgcgtgactgcctcgcgtttggcgagccgatgaaaataggttatttaccagattcctttggcatgtccgggcaactgccgcatatctacaatggatttggcattacccgcaccatgttctggcgcggatgtagcgagcgccacggtactgataaaaccgagtttttgtggcaaagcagtgacggtagcgaagtgacggcgcaggtgctgccgctgggctacgccatcggtaagtacttacctgccgacgaaaacggattacgtaaacgcctcgacagttattttgacgtgctggaaaaagcgtctgtaaccaaagagattttgctgccgaatgggcatgaccagatgccattgcagcaaaatatcttcgaagtgatggataagctacgtgagatctaccctcaacgtaagtttgtgatgagccgctttgaagaggtatttgagaagatcgaagcgcagcgagataatctggcaaccctgaaaggggaatttattgatggcaaatatatgcgcgtgcatcgcaccatcggttctacgcgtatggatatcaaaattgcccacgcgcgtattgaaaataagattgttaatctgctggaaccgctggcaacactggcctggacgttgggttttgaataccaccacggcttgctggagaaaatgtggaaagagatcttaaaaaatcatgcccacgacagtatcggctgctgctgtagtgacaaagttcatcgcgaaatcgtcgcccgcttcgaactggctgaagacatggcggataatctgattcgtttctacatgcgcaaaattgccgacaacatgccgcagagcgacgccgacaaactcgtcctgtttaacctgatgccctggccgcgtgaagaagttatcaacaccactgtgcggctgcgcgccagccagtttaatttgcgggacgatcgcggtcagcctgtaccgtattttattcgccatgcccgtgagatcgatccaggcctaatcgatcggcaaatagttcattacggtaattacgatccctttatggagtttgatatacagatcaaccagattgtcccttctatgggctatcgcacgctttatatcgaagcgaatcagcctggcaacgtaattgcggcaaaaagtgacgctgaagggatactggaaaatgctttctggcaaattgcgctcaatgaggatggttctctgcaactggtagataaagacagcggtgtgcgctatgaccgggtattgcaaattgaagaaagctctgatgatggtgatgaatatgactatagtcccgcaaaagaagagtgggtaattaccgcagcgaacgcgaaaccgcaatgcgatattattcatgaagcctggcagagcagggctgttatccgctatgacatggcagtgccgctcaatttgagtgaacgcagcgcccggcaatccactggcagagtaggggtggtgttggttgtcactcttagtcataacagcaggcgtattgatgtggatatcaatcttgataaccaggctgacgatcatcgccttcgtgtcctggtccctacaccttttaacaccgacagtgttctggcagatacgcagtttggtagcctaacgcgccccgtgaacgacagtgcaatgaacaactggcagcaagaaggctggaaagaagcgccggttccggtatggaatatgctcaactatgttgccttacaggaagggcgtaacggcatggctgtctttagcgaagggttacgtgaatttgaagtcatcggtgaagagaagaaaacctttgccattacgttgctgcgtggcgtgggcttactgggcaaagaagatctgcttttaaggcctgggcggcctagcggaattaaaatgccagtcccggacagtcaactacgtggtctgctttcttgtcgcctaagtttattgagttataccggtacgccaaccgccgctggtgtagctcagcaggcgcgagcatggctgactccagtacagtgttacaacaaaatcccatgggatgtgatgaagctcaacaaagccggattcaacgtgccggaaagttatagtttgttgaaaatgcccccagtgggatgcctgataagcgcacttaagaaagctgaagaccgacaagaagtgattttacggctgtttaatccggctgaaagtgcaacctgtgatgcgactgttgctttcagtcgcgaggtgatttcttgcagtgaaacgatgatggatgaacacattaccaccgaggaaaatcaaggtagtaatctaagcgggccttttttacccggccagagtcggacgttcagttaccggcttgcctgaatagcaatcaaaccgaagccacatatgcgcggccagattgttgacaaagggcgctttgttcatgccggatacggcatgaacgctttattcggtctacaaaagcaggcaaattcaatatattgcagagatgatgtagacactggcaagcgtagcgcatcaggtaattttgcgtttatcttcactctcaagccacgtatatgtggctttatttttaacaaaataataaccctgggtgagttaattataatataattataagttaactaaatgttaatattggcggggtggatttatgcctttattagtaatcctgaaactctgcgtcgtattagccagtgaccaaaaaaagaattaaggtcaaccgtgctgtttttgcttcgtctctttttatctttaattgccaaccgaaactaatttcagccttataactcacacattttaaacataaatgtcactaaagttaccttattgaaacatgattaacataatttgtaggaattgatatttatcaatgtataagtcttggaaatgggcatcaaaaagagataaattgttctcgatcaaattggctgaaaggcggtaatttagctataaattgatcaccgtcgaaaaatgcaaatttgcttcaacaaaaacctgtttattgtaaggattttgcggcgtaatatatacgtgggatcaatttgagtttttattaacatgtttgcaacctttctttacgccgtttttgtgtgcattcacatggtatgatgaaagtgttcaaacaaatttctattggggcatgcgtgtgaccctttctaacggggttcactctcggagtcttcatgcgatgagcaaggagtcatgatgttagatatagtcgaactgagccgcttacagtttgccttgaccgcgatgtaccacttcctttttgtgccactgacgctcggtatggcgttcctgctggccattatggaaacggtctacgtcctctccggcaaacagatttataaagatatgaccaagttctggggcaagttgtttggtatcaacttcgctctgggtgtggctaccggtctgaccatggagttccagttcgggactaactggtcttactattcccactatgtaggggatatcttcggtgcgccgctggcaatcgaaggtctgatggccttcttcctcgaatccacctttgtaggtctgttcttcttcggttgggatcgtctgggtaaagttcagcatatgtgtgtcacctggctggtggcgctcggtagtaacctgtccgcactgtggattctggttgcgaacggctggatgcaaaacccaatcgcgtccgatttcaactttgaaactatgcgtatggagatggtgagcttctccgagctggtgcttaacccggttgctcaggtgaaattcgttcacactgtagcgtctggttatgtgactggcgcgatgttcatcctcggtatcagcgcatggtatatgctgaaaggtcgtgacttcgccttcgctaaacgctcctttgctatcgctgccagcttcggtatggctgctgttctgtctgttattgttctgggtgatgaatccggctacgaaatgggcgacgtgcagaaaaccaaactggctgctattgaagccgagtgggaaacgcaacctgcgcctgctgcctttactctgttcggcattcctgatcaggaagaggagacgaacaaatttgcgattcagatcccttacgcactgggcatcattgcaacgcgttccgtggataccccggttatcggcctgaaagagctgatggtgcagcatgaagaacgcattcgtaacgggatgaaggcgtactctctgctcgaacaactgcgttctggttctaccgaccaggcggttcgtgaccagttcaatagcatgaagaaagacctcggttacggtctgctgctgaaacgctatacgccaaacgtggctgatgcgactgaagcgcagattcaacaggcaaccaaagactccatcccgcgtgtagcgccgctgtactttgcgttccgtatcatggtggcgtgtggcttcctgcttctggcaatcatcgcgctctctttctggagtgtcatccgcaaccgcattggcgagaaaaaatggcttctgcgcgccgcgctgtacggtattccgctgccgtggattgctgtagaagcgggctggttcgtggctgaatatggccgccaaccgtgggctatcggtgaagtgctgccgacagctgtggcgaacagcagtctgaccgcaggcgatctcatcttcagtatggtgctgatttgcggcctgtataccctgttcctggtggcagaattgttcttaatgttcaagtttgcacgcctcggcccaagcagcctgaaaaccggtcgctatcactttgagcagtcttccacgactactcagccggcacgctaagacaggagtcgtcaaatgatcgattatgaagtattgcgttttatctggtggctgctggttggcgttctgctgattggttttgcagtcactgacggtttcgacatgggggtgggcatgctcacccgtttcctcggtcgtaacgacaccgagcgtcgaattatgattaactccattgcaccacactgggacggtaaccaggtttggctgatcaccgcgggcggcgcactctttgctgcctggccgatggtctatgccgctgcgttctccggcttctatgtggcgatgatcctcgtgctggcgtctttgttcttccgtccggtcggttttgactaccgctccaagattgaagaaacccgctggcgtaacatgtgggactggggcatcttcattggtagcttcgttccgccgctggtaattggtgtagcgttcggtaacctgttgcagggcgtaccgttcaacgttgatgaatatctgcgtctgtactacaccggtaacttcttccagttgcttaacccgttcggcctgctggcaggcgtggtgagcgtagggatgatcattactcagggcgcaacctatctgcaaatgcgtaccgtgggcgaactgcacctgcgtacccgtgcaacggctcaggtggctgcgctggtgacactggtctgtttcgcactggctggcgtatgggtgatgtacggtatcgatggttatgtcgtgaaaagcacaatggaccattacgcagcctctaacccactgaataaagaagtggttcgtgaagctggcgcatggctggttaacttcaacaacacgccaattctgtgggctattccggcactgggtgtggttctgccgctgctgaccatcctgactgcacgtatggataaagccgcgtgggcgtttgtgttctcctccctgacgctggcctgcatcatcctgacagccggtatcgcaatgttcccgtttgtgatgccgtccagcaccatgatgaacgcaagtctgacaatgtgggatgcaacttccagccagctgacgcttaacgtcatgacctgggttgcggtggttctggtaccgatcattctgctctacaccgcctggtgttactggaaaatgttcggtcgtatcaccaaagaagatattgaacgtaacacccactctctgtactaagtaaggagctaaaaatgtggtatttcgcatggattctgggaacgcttcttgcctgtagctttggggtaatcaccgcgctggcgcttgaacacgtcgaaagtggcaaagccggtcaagaagacatctgatgagtaagattatcgcgactttgtatgcggtaatggacaagcgccccctgcgggcgctttccttcgtgatggcgcttctgttagcaggatgtatgttttgggacccatctcgttttgccgcgaagaccagtgaactggaaatctggcatggtttattgctgatgtgggccgtctgtgctggtgtgattcacggcgtgggctttcgtccgcagaaggttctttggcaagggattttttgcccattgcttgccgatattgttctcattgtcgggctgattttcttcttcttttaaatcagaattctctttaaaaaattatgggccgctccaggcccataaatttttacgctcccttaacttgccctcattcccaaacctcaatcgcgcgcgtatagtagcagcgtttaaaagctctaacttttgttgcattaccgggatgtaaagtgaatacaacgctgtttcgatggccggttcgcgtctactatgaagataccgatgccggtggtgtggtgtaccacgccagttacgtcgctttttatgaaagagcacgcacagagatgctgcgtcatcatcacttcagtcagcaggcgctgatggctgaacgcgttgcctttgtggtacgtaaaatgacggtggaatattacgcacctgcgcggctcgacgatatgctcgaaatacagactgaaataacaagtatgcgtggcacctctttggttttcacgcaacgtattgtcaacgccgagaatactttgctgaatgaagcagaggttctggttgtttgcgttgacccactcaaaatgaagcctcgtgcgcttcccaagtctattgtcgcggagtttaagcagtgactgacatgaatatccttgatttgttcctgaaggctagccttctggttaaacttatcatgttgattttgattggttttagtatcgcatcttgggccattattatccagcggacccgtattcttaacgcagcggcgcgcgaagccgaagcgtttgaagataaattctggtctggaatcgaactctctcgcctctatcaagagagccaggggaaacgggataatctgactggtagcgaacaaatcttttacagcgggttcaaagagtttgtgcgcctgcatcgtgccaatagccatgcgccggaagccgtagtggaaggggcgagccgtgctatgcgtatctccatgaaccgtgaacttgaaaatctggaaacgcacattccgttcctcggtacggttggctccatcagcccgtatattggtctgtttggtacggtctgggggatcatgcacgcctttatcgccctcggggcggtaaaacaagcaacactgcaaatggttgcgcccggtatcgcagaagcgttgattgcgactgcaattggtctgtttgccgctatcccggcagttatggcctacaaccgcctcaaccagcgcgtaaacaaactggaactgaattacgacaactttatggaagagtttaccgcgattctgcaccgccaggcgtttaccgttagcgagagcaacaaggggtaagccatggccagagcgcgtggacgaggtcgtcgcgatctcaagtccgaaatcaacattgtaccgttgctggacgtactgctggtgctgttgctgatctttatggcgacagcgcccatcatcacccagagcgtggaggtcgatctgccagacgctactgaaagtcaggcggtgagcagtaacgataatccgccagtgattgttgaagtgtctggtattggtcagtacaccgtggtggttgagaaagatcgcctggagcgtttaccaccagagcaggtggtggcggaagtgtccagccgtttcaaggccaacccgaaaacggtctttctgatcggtggcgcaaaagatgtgccttacgatgaaataattaaagcactgaacttgttacatagtgcgggtgtgaaaagcgttggtttaatgacgcagcctatctaaacatctgcgtttcccttgcttgaaagagagcgggtaacaggcgaacagtttttggaaaccgagagtgagtaaggcaaccgaacaaaacgacaagctcaagcgggcgataattattagtgcagtgctgcatgtcatcttatttgcggcgctgatctggagtagcttcgatgagaatatagaagctagtgccggaggcggcggtggtagctccatcgacgctgtcttggttgatagtggtgcggtagttgagcagtacaaacgcatgcaaagccaggaaagtagcgcgaagcgttctgatgaacagcgcaagatgaaggaacagcaggctgctgaagaactgcgtgagaaacaagcggctgaacaggaacgcctgaagcaacttgagaaagagcggttagcggctcaggagcagaaaaagcaggctgaagaagccgcaaaacaggccgagttaaagcagaagcaagctgaagaggcggcagcgaaagcggcggcagatgctaaagcgaaggccgaagcagatgctaaagctgcggaagaagcagcgaagaaagcggctgcagacgcaaagaaaaaagcagaagcagaagccgccaaagccgcagccgaagcgcagaaaaaagccgaggcagccgctgcggcactgaagaagaaagcggaagcggcagaagcagctgcagctgaagcaagaaagaaagcggcaactgaagctgctgaaaaagccaaagcagaagctgagaagaaagcggctgctgaaaaggctgcagctgataagaaagcggcagcagagaaagctgcagccgacaaaaaagcagcagaaaaagcggctgctgaaaaggcagcagctgataagaaagcagcggcagaaaaagccgccgcagacaaaaaagcggcagcggcaaaagctgcagctgaaaaagccgctgcagcaaaagcggccgcagaggcagatgatattttcggtgagctaagctctggtaagaatgcaccgaaaacggggggaggggcgaaagggaacaatgctagccctgccgggagtggtaatactaaaaacaatggcgcaagtggggccgatatcaataactatgccgggcagattaaatctgctatcgaaagtaagttctatgacgcaagctcctatgcaggcaaaacctgtacgctgcgcataaaactggcacccgatggtatgttactggatatcaaacctgaaggtggcgatcccgcactttgtcaggctgcgttggcagcagctaaacttgcgaagatcccgaaaccaccaagccaggcagtatatgaagtgttcaaaaacgcgccattggacttcaaaccgtaatcgcgatgttgactgttcggacggtcaacatcaggcaccggttgccacggggttctggtagttttgtgtattttagtttgttaacattctgctaaattatcgtgggccatcggtccagataagggagatatgatgaagcaggcattacgagtagcatttggttttctcatactgtgggcaagtgttctgcatgctgaagtccgcattgtgatcgacagcggtgtagattccggtcgtcctattggtgttgttcctttccagtgggcggggcctggtgcggcacctgaagatattggcggcatcgttgctgctgacttgcgtaacagcggtaaatttaatccgttagatcgcgctcgtctgccacagcagccgggtagtgcgcaggaagtacaaccagctgcatggtccgcactgggcattgacgctgtagttgtcggtcaggtcactccgaatccggatggttcttacaatgttgcttatcaacttgttgacactggcggcgcaccgggtactgtacttgctcagaacagctacaaagtgaacaagcagtggctgcgttatgctggtcataccgccagtgatgaagtgtttgaaaaactgaccggcattaaaggtgcgttccgtactcgtattgcctacgttgttcagaccaacggcggtcagttcccgtatgaactgcgcgtatctgactatgacggttacaaccagtttgtcgttcaccgtagtccgcagccgctgatgtctccggcgtggagtccagacggttctaaactggcttatgtgaccttcgaaagcggtcgttccgcgctggttattcagacgctggcaaatggcgctgtacgtcaggtggctagtttcccgcgtcacaacggtgcacctgcattcagcccagacggcagcaaactggcattcgccttgagcaaaaccggtagtctgaacctgtacgtaatggatttggcttctggtcagatccgccaggtgactgatggtcgcagtaacaataccgaaccgacctggttcccggatagccagaacctggcatttacttctgaccaggccggtcgtccgcaggtttataaagtgaatatcaacggcggtgcgccacaacgtattacctgggaaggtagccagaaccaggatgcggatgtcagcagcgacggtaaatttatggtaatggtcagctccaatggtgggcagcagcacattgccaaacaagatctggcaacgggaggcgtacaagttctgagctccacgttcctggatgaaacgccaagtctggcacctaacggcactatggtaatctacagctcttctcaggggatgggatccgtgctgaatttggtttctacagatgggcgtttcaaagcgcgtcttccggcaactgatggacaggtcaaattccctgcctggagcccgtatctgtgataataattaattgaatagtaaaggaatcattgaaatgcaactgaacaaagtgctgaaagggctgatgattgctctgcctgttatggcaattgcggcatgttcttccaacaagaacgccagcaatgacggcagcgaaggcatgctgggtgccggcactggtatggatgcgaacggcggcaacggcaacatgtcttccgaagagcaggctcgtctgcaaatgcaacagctgcagcagaacaacatcgtttacttcgatctggacaagtacgatatccgttctgacttcgctcaaatgctggatgcacatgcaaacttcctgcgtagcaacccgtcttacaaagtcaccgtagaaggtcacgcggacgaacgtggtactccggaatacaacatctccctgggtgaacgtcgtgcgaacgccgttaagatgtacctgcagggtaaaggcgtttctgcagaccagatctccatcgtttcttacggtaaagaaaaacctgcagtactgggtcatgacgaagcggcatactccaaaaaccgtcgtgcggtactggtttactaagagaattgcatgagcagtaacttcagacatcaactattgagtctgagcttactggttggtatagcggccccctgggccgcttttgctcaggcaccaatcagtagtgtcggcagtggcagcgtcgaagaccgcgtcactcaacttgagcgtatttctaatgctcacagccagcttttaacccaactccagcaacaactttctgataatcaatccgatattgattccctgcgtggtcagattcaggaaaatcagtatcaactgaatcaggtcgtggagcggcaaaagcagatcctgttgcagatcgacagcctcagcagcggtggtgcagcggcgcaaagtaccagcggcgatcaaagcggtgcggcggcaagtacgacgccgacagctgatgctggtactgcgaatgctggcgcgccggtgaaaagcggtaatgcaaacacggattacaatgcagctattgcgctggtgcaggataaatcccgccaggatgacgcaatggtggcatttcagaatttcatcaaaaattaccctgatagtacttacctgccaaacgccaattattggctgggtcagttaaactacaacaagggtaaaaaagatgatgcggcgtactattttgctagcgtagtgaaaaactatccgaagagtccaaaggctgcagatgcgatgtttaaagtcggcgtcatcatgcaggacaaaggtgacaccgcaaaagcgaaagccgtataccagcaggttatcagtaaataccctggtactgatggcgctaaacaggcacaaaaacgtctgaacgcgatgtaatgcataacacacgaccagaagtcgcattatttctggtcgtgtcgtgcgaatcataagcagttgagtgatctacatcgaaatttttgttgcgctcaagtctgaaatcagtaatatatgccgccgttgccacgggatatcaaacaaaccgaaagcaacgaaaaagtgggtcgttagctcagttggtagagcagttgacttttaatcaattggtcgcaggttcgaatcctgcacgacccaccaatcgctaaggtggaagcggtagtaaaacgtgaaggataacgttgcatgagcaacggcccgaagggcgagacgaagtcgagtcatcctgcacgacccaccactaacatagttagttgtagtatccagcgtagtatcgggtgattagctcagctgggagagcacctcccttacaaggagggggtcggcggttcgatcccgtcatcacccaccaccgggtcgttagctcagttggtagagcagttgacttttaatcaattggtcgcaggttcgaatcctgcacgacccaccagttttaacatcgaagacagatgttaagcgtgtaggataacgttgcgtcagcaacggcccgtagggcgagcgaagcgagtcatcctgcacgacccaccactaatgacggtgggttcggtggaagtagtttgtagtatccagcgcagtatcgggtgattagctcagctgggagagcacctcccttacaaggagggggtcggcggttcgatcccgtcatcacccaccactcgggtcgttagctcagttggtagagcagttgacttttaatcaattggtcgcaggttcgaatcctgcacgacccaccagttttaacatcaaactcagatgttaagcgtgaaggataacgttgcgccagcaacggcccgtagggcgagcgaagcgagtcatcctgcacgacccaccaatcttaaagattggccccgagtaaaaatctttcaggtaacacccgtatgggtcgttagctcagttggtagagcagttgacttttaatcaattggtcgcaggttcgaatcctgcacgacccaccaatttaaaggtggttactggtagagaacgtgaaggataacgttgcgttagcaacggcccgaagggcgagacgaagtcgagtcatcctgcacgacccaccatcctgaatgattaaggcagcataatcccgcaaggggtcgttagctcagttggtagagcagttgacttttaatcaattggtcgcaggttcgaatcctgcacgacccaccaatgtaaaaaagcgccctaaaggcgcttttttgctatctgcgatactcaaagattcgaacctgcagcaggtttgagttgagcgcagcgaaacaacggagccgctcgcggcgacggcccgaagggcgagcgaagcgagtcatcctgcacgacccaccaatgtaaaaaagcgccctaaaggcgcttttttgctattcaggcatcctcaatttcactttgtaaacctgatgacatcgtcagagcttactgtgcaagcaactctatgtcggtggaattaggcgtaaaatgacgcatcctgcacattaggcgtaattcgagtgacttttccccaccattcgactatcttgtttagcatataaaacaaattacaccgataacagcgaatattacgctaatgtcggttttaacgttaagcctgtaaaacgagatggtaagatgagcgtaatgtttgatccagacacggcgatttatcctttccccccgaagccgacgccgttaagcattgatgaaaaagcgtattaccgcgagaagataaaacgtctgctaaaagaacgtaatgcggtgatggttgcccactactataccgatcccgaaattcaacaactggcagaagaaaccggtggctgtatttctgattctctggaaatggcgcgcttcggtgcaaagcatcccgcttctactttgttagtcgctggggtgagatttatgggagaaaccgccaaaattctcagtccggaaaaaacaattctgatgccgacacttcaggctgaatgtagtctggatctcggctgccctgttgaagaatttaacgcattttgcgatgcccatcccgatcgtactgtcgtcgtctacgccaacacttctgctgcggtaaaagcgcgcgcagattgggtggtaactagtagcattgccgtcgaacttattgatcatcttgatagtttgggtgaaaaaatcatctgggcacccgacaaacatctggggcgttacgtgcaaaaacagacgggtggagacattctatgctggcagggtgcctgtattgtgcatgatgaatttaagactcaggcgttaacccgcttgcaagaagaatacccggatgctgccatactggtgcatccagaaagtccacaagctattgtcgatatggcggatgcggtcggttccaccagtcaactgatcgctgctgcgaaaacattgccacatcagaggcttattgtggcaaccgatcggggtattttctacaaaatgcagcaggcggtgccagataaagagttactggaagcaccaaccgcaggtgagggtgcaacctgccgcagctgcgcgcattgtccgtggatggccatgaatggccttcaggccatcgcagaggcattagaacaggaaggaagcaatcacgaggttcatgttgatgaaaggctgcgagagagggcgctggtgccgctcaatcgtatgctggattttgcggctacactacgtggataacgaataataaggcgtaacgttacgctttgggggaaagatggatttttttagtgtgcagaatatcctggtacatataccaataggggcaggcggttatgatctcagttggatcgaagcggtaggcacgatcgccgggttgctgtgtattggccttgccagtctggagaagatcagcaactacttctttggcctgatcaacgtcaccttgtttggcattattttctttcagattcagctgtatgccagcctgctattacaggtgtttttctttgccgcgaatatttacggttggtatgcgtggagccgacaaaccagtcagaacgaggcggagttgaaaattcgctggttgccattgccgaaggcactcagctggttggcggtttgcgttgttagcattggtctgatgacggtatttatcaatccggtgtttgcatttttgacccgcgtggcagtcatgatcatgcaagcattaggattacaggttgtgatgcctgaactgcaaccggacgctttcccgttctgggatagttgcatgatggtgttatctatcgtggcaatgattctgatgacgcgtaagtatgtggaaaactggctgttgtgggtgattattaacgtgattagcgtcgttatttttgcacttcagggcgtttacgccatgtctctggagtacatcatcctgacctttattgcgctcaacggcagccggatgtggatcaacagcgcacgtgaaagaggcagtcgcgcgctgtcccattaatggtgatgatgactatggccagacaccccttcattcaggtggcagtctggcccatgacaaggttgatattccatctgaatggtggcgtgctcaatctgatagtgatccatcaggtagtgttggatctgatccaacaaggcatcgtgatcgtgtggcgggatcacctgcacatgcaacgtcatcaccggcttctcgcctaccatccatacatgtacatggtgcacattgcggacttccgggatttcccggcacatacgacgcttcagttcagcgatatccaggcttaccggtgcaccttcaagtaattcattcacgctatctttcaacagtcgccacgcgctacgcagaaccagaaggctcaccagtatgctgagaatggggtcagcaggtgtccagccagtccagataataatcaacgcggcaataatagccccaacgctacccagcaggtccccgagcacatgcagtgccgctgctcgtacgttgaggtttttctcttcgctgccgtgatgaagtaaccagaaagaaagtatatttgccagcaacccagccacggcaattgccatcatcatgccgccctcgaccggacgcggcgtgcggaagcgttctatcgcctcccagacaatcaaaatggtaattaccacgagggctatggcattcacaaacgccgcgagcgtggtcagtcttagccaaccgaaagtgtggcgaatggtgggaggacgacgactaaattgcacggcgagtagggcgaaaagcagggcggcagtatcggtcaacatatgacccgcatcggccagcaatgccagagaaccagaaagaaaaccaccaacgacttctaccagcataaacccggcagtcacgccgaaagcatacaacaagcgacgagcattattatcttctggcaggtgactggacgtgtgactgtgactgtgcgccatgacgagtcatcccttaattattctcacttaactttatgacatcatactgcttttagaagtgaaaaattaaaagggagagactccgctctcccattattggctattttgcagggttactgcgtggtaccgtcggttttggtatcgacatcattattgatgccatcaccggtttgtacctttttattgatatccggacagcgaccatctttgcacatggtgttcttgtgctcttcatctttggtcattccgtcattgttcatactagaaccatcgctatgcagcattgtgccgccagaaccggtatttaccccgttattgtcgacgttatttggcgcgacattttcacgggcgtcaggggctacctggcccgcatcagctgcggcgtttgcctggccgttattagtttgcgctccgctatcggcagccagtgcggcaccgctggcaaggcttagagtggcagtcagaaataatgtggccagttttgtcattttcataggatgctcctgttatggtcgttatgtcggataacctcttccaacagtgcatttgcaggtgaatataaggcattggtttaagatttcagccaggttatgaaacgcagcagagaatcttgaaataattaacaaacaaaggagttacagttagaaattgtaggagagatctcgtttttcgcgacaatctggcgtttttcttgctaattccaggattaatccgttcatagtgtaaaaccccgtttacacattctgacggaagatatagattggaagtattgcattcactaagataagtatggcaacactggaacagacatgaattatcagaacgacgatttacgcatcaaagaaatcaaagagttacttcctcctgtcgcattgctggaaaaattccccgctactgaaaatgccgcgaatacggttgcccatgcccgaaaagcgatccataagatcctgaaaggtaatgatgatcgcctgttggttgtgattggcccatgcagtattcatgatcctgtcgcggcaaaagagtatgccactcgcttgctggcgctgcgtgaagagctgaaagatgagctggaaatcgtaatgcgcgtctattttgaaaagccgcgtaccacggtgggctggaaagggctgattaacgatccgcatatggataatggcttccagatcaacgacggtctgcgtatagcccgtaaattgctgcttgatattaacgacagcggtctgccagcggcaggtgagtttctcgatatgatcaccccacaatatctcgctgacctgatgagctggggcgcaattggcgcacgtaccaccgaaagccaggtgcaccgcgaactggcaagtgggctttcttgtccggtcggcttcaaaaatggcaccgacggtacgattaaagtggctatcgatgccattaatgccgccggtgcgccgcactgcttcctgtccgtaacgaaatgggggcatagcgcgattgtgaataccagcggtaacggcgattgccatatcattctgcgcggcggtaaagagcctaactacagcgcgaagcacgttgctgaagtgaaagaagggctgaacaaagcaggcctgccagcacaggtgatgatcgatttcagccatgctaacagctccaaacaattcaaaaagcagatggatgtttgtgctgacgtttgccagcagattgccggtggcgaaaaggccattattggcgtgatggtggaaagccatctggtggaaggcaatcagagcctcgagagcggggagccgctggcctacggtaagagcatcaccgatgcctgcatcggctgggaagataccgatgctctgttacgtcaactggcgaatgcagtaaaagcgcgtcgcgggtaaggtttaattgtcggatgcgccgtcagagtggcgtatccgatgaatcaccacaggcctgataagtcgcgcagcgtcgcatcaggcaatgtgctccattgttagcaacaaaaaagccgactcacttgcagtcggctttctcattttaaacgaatgacgtttacttcgctttaccctggtttgcaaccgccgctgctttcgctgcgatctcgtcagcattacccagataatagcgtttcagcggtttgaaattctcgtcgaactcatacaccagcggcacgccagtcgggatattaagctcaagaatctcttcttcgctcatgttatcaagatatttcaccagcgcacgtaaagagttaccgtgtgcagcgatgatcacgcgctcaccgctcttcatacgcggcagaatagtttcattccagtaagggatcacgcggtcaatggtcagcgccaggctttccgtcagcggcagttctttctcgctcagtttcgcgtaacgcggatcgtgacccggataacgctcatcatctttagtcagttccggcggagtcactgcaaaaccacgacgccactgtttcacctgctcgtcgccatacttttcagcagtttccgctttgttcagaccctgcaacgcaccgtagtgacgttcgttcagtttccaggatttctcaacgggcagccatgcctgatccagttcgtccagcacattccacagggtatggatagcgcgtttcagcacagaagtgtaagcaaagtcaaagctgtaaccttcctctttcagcagcttacctgctgcttttgcttcgcttacgcctttctcagacagatccacgtcgtaccaaccggtgaaacggttttctttgttccactgactttcgccatgacgaaccagaaccagcttagttacagccatatacttactcctcaaatcatcttttaatgataataattctcattatattgccgcgacgaagcaacagcaatgcttacgcataaccatagcgaaaatagtggcgcagtgtaaggttgttgtgaatattgagttgcaaatatgtcggtgtttgctggtgatttgaacaatatgagataaagccctcatgacgagggcgtaacattactcagcaataaactgatattccgtcaggctggaatactcttcgccaggacgcaggaagcagtccggttgcggccattcagggtggttcgggctgtccggtagaaactcgctttccagagccagcccttgccagtcggcgtaaggttcggttccccggctcggtgtgccgccgaggaagttgccggagtagaattgcagagccggagcggtggtgtagaccttcagctgcaatttttcatctgcactccagacatgcgccgccactttcttgccatcgcctttggcctgtaacaagaatgcgtgatcgtaacctttcactttgcgctgatcgtcgtcggcaagaaactcactggcgatgattttggcgctgcggaaatcaaaagacgttccggcgacagatttcaggccgtcgtgcggaatgccgccttcatcaaccggcagatattcgtccgccagaatctgcaacttgtgattgcgcacgtcagactgctcgccgtcaagattgaaatagacgtgattagtcatattcaccgggcaaggtttatcaactgtggcgcgataagtaatggagatacggttatcgtcggtcagacgatattgcaccgtcgcgccgagattacccgggaagccctgatcaccatcatcactactcagggcaaacagcacctgacgatcgttctggttcacaatctgccagcgacgtttgtcgaacccttccggcccgccgtgcagctggttaacgccctgacttgggctaagcgtcacggtttcaccgtcaaaggtataacggctattggcgatacggttggcataacgaccaatagaggcccccagaaacgcggcctgatcctgatagcattccgggctggcacagccgagcagcgcctcgcggacgctgccatcggaaagcggaatacgggcggaaagtaaagtcgcaccccagtccatcagcgtgactaccatccctgcgttgttacgcaaagttaacagtcggtacggctgaccatcgggtgccagtgcgggagtttcgttcagcactgtcctgctccttgacttggtttacaaacgtaaaaagtctctttaatacctgtttttgcttcatattgttcagcgacagcttgctgtacggcaggcaccagctcttccgggatcagcgcgacgatacagccgccaaatccgccgccggtcatgcgtacgccacctttgtcgccaatcacagctttgacgatttctaccagagtgtcaatttgcggcacggtgatttcgaaatcatcgcgcatagaggcatgagactccgccatcaactcgcccatacgtttcaggtcgccttgctccagcgcgctggcagcttcaacggtgcgggcgttttcagtcagtatatgacgcacgcgttttgccacgatcgggtccagttcatgcgcaacagcgttgaactcttcaatggtgacatcacgcagggctggctgctggaagaaacgcgcaccggtttcgcactgttcacgacgggtgttgtattcgctgccaaccagggtacgtttgaagttactgttgatgatgacgacagccacacctttgggcatggaaactgctttggtccccagactgcggcaatcgatcagcaaggcatgatctttcttgccgagcgcggaaattagctgatccatgatcccgcagttacagcctacaaactggttttctgcttcctgaccgttaagcgcgatttgtgcgccgtccagcggcagatgataaagctgctgcaatacggttccgaccgcgacttccagactagcggaagaacttaacccggcaccctgcggcacattgccgctgatcaccatgtccacgccgccgaagctgttgttacgcagttgcagatgtttcaccacgccacgaacgtagttagcccattgatagttttcatgtgcgacaatgggcgcatcgagggaaaactcgtcgagctgattttcataatcggctgccatcacgcgaactttacggtcatcgcgtggtgcacaactgatcacggtttgataatcaatcgcgcagggcagaacgaaaccgtcgttgtagtcggtgtgttcaccaatcaaattcacgcggccaggcgcctgaatggtgtgagtggcagggtagccaaatgcgttggcaaacagagattgtgttttttctttcagactcatttcttacactccggattcgcgaaaatggatatcgctgactgcgcgcaaacgctctgctgcctgttctgcggtcaggtctcgctgggtctctgccagcatttcataaccaaccataaatttacgtacggtggcggagcgcagcagaggcggataaaagtgcgcgtgcagctgccagtgttgattctcttcgccattaaatggcgcgccgtgccagcccatagagtaggggaaggagcactggaagaggttgtcataacgactggtcagctttttcaacgccagcgccagatcgctgcgctgggcgtcggtcaaatcggtgatccgtaaaacgtgggctttgggcagcagtagcgtttcgaacggccaggcagcccagtaaggcacgacggctaaccagtgttcggtttcgacaacggtacggctaccgtctgccagctcgcgctgaacataatccaccagcattggacttttctgttcggcaaaatattctttttgcaggcggtcttcgcgctcagcttcgttaggcaggaagctatttgcccaaatctgaccgtgcggatgcgggttagagcagcccatcgccgcgcctttgttttcaaaaacctgcacccatgggtacgttttccccagttctgcggtttgctcctgccaggttttgacgatttccgtcaatgctgcaacgctgagctctggcagcgttttactgtgatccggactaaagcagatcacccggctggtgccgcgcgcgctctggcaacgcatcagcggatcgtgactttctggcgcatctggcgtgtcagacatcaaagccgcaaagtcattagtgaaaacgtaagtcccggtgtaatcggggtttttatcgcctgtcacccgcacattacctgcgcagaggaagcaatctggatcgtgcgcaggtaacacctgtttggctggcgtttcctgcgccccctgccaggggcgcttagcgcggtgcggactaaccagaatccattgcccggtgagcgggttgtagcggcgatgtggatgatcaacgggattaaattgcgtcatggtcgttccttaatcgggatatccctgtggatggcgactctgccagtgccaggtgtcctgcgccatttcatcgagtgtgcgcgttacgcgccagttcagttcacggtcggctttgctggcgtccgcccagtaggccggaaggtcgccctcgcgacgcggtgcaaaatgataattaaccggtttgccgcaggctttgctgaaggcattaaccacgtccagcacgctgttgcctacgccagcgccgaggttgtagatgtgtacgcctggcttgttcgccagtttttccatcgccacgacgtgaccgtccgccagatccattacgtggatgtaatcgcgtacgccagtaccatcttcggtcggataatcgttaccaaaaatcgccaggctgtcgcgacggcctacagcaacctgggcgatgtatggcatcaggttattcggaatgccttgcggatcttcgcccatatcgccgctcggatgcgcgccaaccgggttgaagtagcgcagcagggcaatgctccagtccggctgggctttttgcagatcggtgaggatctgttccaccatcagcttgcttttgccgtaagggctttgcggtgtgccggtcgggaagctttcaacgtatggaattttgggctgatcgccataaacggtggcggaggagctaaaaataaagtttttgacgttagcggcgcgcatggcgctaatcaggcgcagagtgccgttgacattgttgtcgtaatattccagcggtttttgtacgctttcgcccacggctttcagcccggcgaagtggatcacggtgtcgatagcgtgatcgtgcaggatctcggtcatcaacgcttcgttacgaatatcgccttcaacaaacgttggatgtttgccgcctaaacgctcgataacaggcagtacgatgcgcttactgttacagaggttatcaagaatgatgacatcatgaccgttttgcagtaattgcacacaggtatgacttccaatgtaaccgctaccaccggtaaccagaactctcataattcgctccattaggcttatggtatgaaataaccatagcataacaaagatgcgaaaagtgtgacatggaataaattagtggaatcgtttacacaagaatttagccgttttttatgcgcgattaagtgattataaaacagagggtttatgaatgattgcgctttttatctgaaaaaagacgcggtttcatgcctgcatgcgtcgaaccgttggccggagagggtgctaaggccgcctccggcaaggtcagcactaccgactcaatatatttttgtcagcacatagcgatagagtccaccgtccggcacgaactcaagacgatgggtaatacaggcaggcgcatcttcagcgtggtggctaacaaacaacaattgcgtttcaccttcgctaatcagcacatcaacaaaacggcggataagctggcgattcagcggatcaagcccctgtagtggttcatcgagaataagcaacgtcggatgtttcaccagtgcgcggacaatcagcgccagacgctgctgtccccaggaaagactatggaacggagcgtcagccgtgcgtttatcaatgccgagaatatccagccactgctgcaccagtttttgctggcgatcgctaacggcctgataaatgccaatgctatcaaaatagccagaaagaatcacattacgcacggtagtgctgacccggtaatccagatgcaaactactgctgacgtaaccgatatgctttttgatatcccagatggtttcgccgctgccgcgacgtcgtccgaaaagcgtcaaatcgttgctgtaaccttgcggatgatcgccagtaaccaggcttaataacgtgctttttcctgcaccatttggcccgacaatttgccagtgttcgcctggattcacctgccagctaaggttattaagaatggggcgatcgttataagaaaccacgccattgttcagcacaatgcgcggttcgttggcgggtaaggcgtgacgtgcactaggttcatccggctccggcagttgcacaccttcaagctgttcactatgcgccagttgcgcgacgagtgcttgttggagcagttcctctttagcgccagtttccgctaacgtgcaatccgccagcacgccagcaaactggacaaactccgggatctcatcgaagcgattgagcaccagtaccagagtaataccggactgatgtaagctggcgagtcgctcagccagctgctgacgactggcaacatccaggccatcgaacggctcatcaagaatcaacaagtcaggctcgctcatcagcgcctgacacagcagggtttttcgcgtctcgccagtggaaaggtatttaaagcgtcggtcgaggagggcggtaataccgaactgctgcgccagttgcatgcaacgcggtgcatcctttacttcatcctgaatgatctcagccgtagtgcgtccggtgtcatcttcgccagggccgagcatatcggtgttattccgctgccattcgtcgctgacgagtttttgcaattgctcgaaggagagacgagtgatgtgggaaaactggctttgccgttcacctttcaaaagcggaagttcccccgccagcgcgcgggccagggcgcttttcccgcttccattgctaccgacaaacgcccaactatcacccgcgtttaacgttagctgaggcaattgcagcgtttttgtgtcgctaagacgaaacgtgccttgcaaaatttgcaagctactcattttatatcccactttgtgcagcgattactgacagggatacgtgtttcataacaaattgtcaacacgcttagcacagcgtggcgataatcacgctgtcggcattaaagtaggccgtgacattctgtccttgctgaagagaagtcgcttcatttaccggcactgtggcgcacagtgtttgcccgtcgggtagcgccattaatacttcgcactgctctgcgccgcgctcaatatgactaataatacccggtaattggttgtcagcgttttgcgcgaccgcctcgtcctgagtaatacctacccacggcgcttttagcaatatcaacacttctttgccttcatccagccccagacgcgcgccgctttgtgcggtaattgcgactttcaggcgtgtttttccgtcagccagtaagacatcaacatgctgttgaacgtcatcatgatcgcgggcggtgatggtaccgaaccactggttacgggcgctggtttgcagactaaaacgactgatcgcggccagcaggctgttcagcggcagggcgtcatcgtcacttaacacatcaaaggctttttgctggatttgcgccagtaagtcatagagctgaatcagtcgctgaccatagcgggtcagtactgcgccgccgccacctttaccgcctgttgcgcgctcgaccagaatatgctcacttaactgattcatctcgttaatggcatcccaggcgcttttatagctaataccggcatctttcgctccctggctaatggaaccggaaagcgcaatgtgttttagtaggctaatgcggcgcgggtcggcgaataatttttgttggagcttaagggtgagaaggatttcggcctgcataacaatgtcctggcaaaagtcttattgtgacggaaaacgaacgccacgcaaagctgaccgcacaaaaggggagtgcttttctgtgcttagcggttagaatagtctcatgactatatctggagttgaccatgttagagttattaaaaagtctggtattcgccgtaatcatggtacctgtcgtgatggccatcatcctgggtctgatttacggtcttggtgaagtattcaacatcttttctggtgttggtaaaaaagaccagcccggacaaaatcattgattccctgaatgcccgcttagtcgggcattttctttttctcaacttcctgcttttcctgccgatattttttcttatctacctcacaaaggttagcaataactgctgggaaaattccgagttagtcgttatattgtcgcctacataacgttacattaaggggttaccaatggctcgtaaatggttgaacttgtttgccggggcggcactctctttcgctgttgctggcaatgcactggcagatgaagggaaaatcacggtgttcgccgccgcaagtctgactaacgcaatgcaggacattgctacgcagtttaaaaaagagaaaggcgtggatgtggtttcttctttcgctagcagttctactctcgcccgtcagattgaagcgggtgcgcctgcggatctgtttatttctgccgatcagaaatggatggattatgcggttgataaaaaagcgatcgatacagctacgcgtcagacactgctcggcaatagcctggtcgttgtagcaccgaaagccagcgtgcagaaagatttcaccatcgacagcaaaaccaactggactagtctgctgaatggcggtcgcctggcggttggcgatccggaacatgttcccgctggcatttatgcaaaagaagcactgcaaaaactgggcgcatgggatacgctctctccgaaactggccccagcggaagatgttcgtggggcgctggcgctggtcgaacgtaacgaagcgcctctgggcattgtctacggttctgacgcagttgccagcaaaggggtaaaagtggttgccaccttcccggaagatagtcataaaaaagtggaatatccggttgctgttgtggaagggcataacaatgcgacagtgaaagcattttatgattatctgaagggaccgcaggcagcggaaatctttaaacgttacggatttacaatcaagtaatgatactgaccgatccagaatggcaggcagttttattaagcctgaaagtttcttccctggctgtgctgtttagcctgccgtttgggatcttttttgcctggttactggtgcgttgcacgtttccgggcaaagctctgctcgacagcgtactgcatctaccgctggtgttaccgcccgtggtcgtcggttacttattattagttagcatgggacggcgcggatttatcggtgaacgtctgtatgactggtttggtattaccttcgcctttagctggcgcggcgcggttctcgctgccgccgtcatgagctttccgctgatggtgcgggcaattcgtctggcgctggaaggggttgatgtcaaactggaacaggccgcaagaacactgggggccgggcgctggcgcgttttctttactatcacgttaccgctgaccttaccgggaattattgttggtacggtactggcttttgctcgttctctcggtgagtttggtgcaaccatcacctttgtgagcaacattcctggtgaaacgcgaaccattccttctgccatgtataccctgatccagacccccggcggggaaagtggagcggcgagactgtgcattatttctattgcgctggcgatgatctccctgttgattagtgaatggctggccagaatcagccgtgaacgggcggggcgctaatcatgctggaactgaatttttcccagacgttgggcaaccattgcctgactattaatgaaacgctgcccgccaatggcatcactgctatctttggcgtctccggtgccggaaaaactagcctgattaacgccatcagtggactgacgcgcccgcaaaaagggcggattgtcctcaatgggcgggtactaaatgatgccgaaaaaggtatctgcctgacgccggaaaagcgtcgcgttggctatgtttttcaggatgcgcggctgttcccgcattacaaagtgcgtggcaatctgcgctacggcatgagcaaaagtatggtcgatcagttcgataagctggtggcgcttttaggcattgaaccgttgcttgaccgtttaccaggcagcctgtccggaggcgaaaaacagcgcgtggcgattggtcgggctttgctgacagcaccggaattgctgttgctggatgaaccgctggcgagtctggatattccgcgtaaacgcgaactgttgccttatctgcaacggctgacacgggaaatcaacattccgatgttgtatgtcagccatagcctggatgagatcctccatctggcagacagagtgatggtactggaaaacggtcaggtgaaagcctttggcgcgctggaggaagtgtggggcagtagcgtgatgaatccgtggctgccgaaagagcaacaaagtagcattctgaaagtgacggtgcttgagcatcatccgcattacgcgatgaccgcgctggcgctgggcgatcagcatttgtgggtcaataagctggacgaaccgctgcaagctgcgctacgtatccgcattcaggcttccgatgtttctctggttttacaaccgccgcagcaaaccagcattcgtaacgtattgcgggcaaaagttgttaatagttatgacgacaacggccaggtggaagtggaactggaagtcggcggtaaaacgctgtgggcgcgtatcagcccgtgggccagggatgaactggcgatcaaacctggcctgtggctgtacgcgcaaattaaaagtgtgagcataaccgcctgattaaatcaggtggctataaatgaactgggcaatgctgtcggtggtgttatcaccaatcacaatgttggcgcgcgcttttaccgcgtcatcggcgttgcccatcgccacgcctgtaccagcggcttccagcatactgatatcattaaagttatcgccgaatgccacgacgttttccatgctccaaccttgcgcctcaacccatttcgtcaaacgtttacctttgctgttgccgccgcgtgcaatatcaacctgatcgtgccaggaccattcacactccagtcccagttcatgttcgacatgcttaccaaaatgctgcaattgcggcaggtcatcgtgcgtcagggcgaacttccatacggcgttaacttgttgcgccgtttcagccagagaagcgacttgtgtgaaagtcggacgctgttccggcggcagggtttgcgcccagttagatgtgcgaatgacatgcccggtcgggtgctcatagaccattgcatcatcgacatacatcagaccgtgaatgtggtgttcattcagcatctcaatgagttgcagggctttaataacgggcattgggtccgcttccagcacggtttttgcatgataatcatacaaataggtgccattacagcaaatagcaggtgtatccagcgccagcgcctgataaaaaggatgaatagcgacgtgatggcgacctgtgacgatgattaattgatagcctgcttcgcgagcgcgggccagggcttctatgctactaggaagcagggtctttttcggggtcaataaggtgccgtctaagtcgagagcaatcacgcgtgtggtcatggcgtattccagattaaggttaagaattttcgtctgcgcgaatggtacaccgataccactatcggacaaaattctgcgttttaattcagcattcaccgccaaaagcgactaattttagctgttacagtcagttgctaaatgcaaaggagcattcatgaagcaaacagtttatatcgccagccctgagagccagcaaattcacgtctggaatctgaatcatgaaggcgcactgacgctgacacaggttgtcgatgtgccggggcaggtgcagccgatggtggtcagcccggacaaacgttatctctatgttggtgttcgccctgagtttcgcgtcctggcgtatcgtatcgccccggacgatggcgcactgacctttgccgcagagtctgcgctgccgggtagtccgacgcatatttccaccgatcaccaggggcagtttgtctttgtaggttcttacaatgcgggtaacgtgagcgtaacgcgtctggaagatggcctgccagtgggcgtcgtcgatgtggtcgaggggctggacggttgccattccgccaatatcagtccggacaaccgtacgctgtgggttccggcattaaagcaggatcgcatttgcctgtttacggtcagcgatgatggtcatctcgtggcgcaggaccctgcggaagtgaccaccgttgaaggggccggcccgcgtcatatggtattccatccaaacgaacaatatgcgtattgcgtcaatgagttaaacagcagtgtggatgtctgggaactgaaagatccgcacggtaatatcgaatgtgtccagacgctggatatgatgccggaaaacttctccgacacccgttgggcggctgatattcatatcaccccggatggtcgccatttatacgcctgcgaccgtaccgccagcctgattaccgttttcagcgttagcgaagatggcagcgtgttgagtaaagaaggcttccagccaacggaaacccagccgcgcggcttcaatgttgatcacagcggcaagtatctgattgccgccgggcaaaaatctcaccacatcagcgtatacgaaattgttggcgagcaggggctactgcatgaaaaaggccgctatgcggtcgggcagggaccaatgtgggtggtggttaacgcacactaaccgctgatttacccggcgcagtctctcctgcgccggtgtattaacctatctcctgtaacgcgtgtctctggcgttcgacgatattggtccacaaattgtctttatcgtcagtccataaattaatcagcaaggcaaaaaagcgttctgctgctggagaaagtacggcatctttacggcgaattattcccaatgttcgacgtataacgggttccaccaatgggataccaataatgctagaatagggcgcatgaggcattgccaggccaggaagcgcgctaatccccagtcccgcctccaccagtcctaaactcgtgctaagatgacgcacttcgtaaaaccagtccagcttccagggcttgtcggccagctgttgttctatcaacagtcggttgccgctggaggagcgtacgccaatcattttgtaacccactaactcctgccattctacaagctgctttttggccaatggatggtcacgccgacaggccagcacgaacggctcgttgaccagtggggtaaaatcaatggaactatttgtgacgttgttcatgtttatgccaaagtcactttcgttacacagcacgctttccatgcaattattcgtgccttgttccagaatccgcactttaatattgggatacagctcattaaatttaccgattgccagcggtaaaaaataaaatactgcggtcggaatacacgctaacgtcaccataccacgatgataagcattcatatcacgaatattaaaaagcgtttcatcgaatttctttattaattcccgcgcctccgggagcaacctttttcctgcttttgttaacgtaaccttgcgagttgtacgctcaaatagttgaacatgtaaatcttcctccatcttttttattcttcgcgttaatgcaggttgcgtaatattgagtaatttagcggcattgttaaagctactggactctgccagtatgacaaatgccttcatactacttaattcatgcttcattattactccggaaaatggaaggctgctttttgggtggctggccgttaaaaattttaactgcatttagccaacttaaattaatgaaaaaatgttattaatcgttgagctaaagtcattagagatgctttgcccttaatgtaaccatatcgcaataagttatgtttttaaattgagggcattattatgaaaaaaataccctgcgtgatgatgcgaggtggaaccagcaggggcgcgttcctgttagcggaacatttacccgaagatcaaacgcagcgcgataaaatattgatggcaattatgggttccggtaacgatctggaaattgacggtattggcggcggtaatccactgaccagtaaagtcgccattattagccgttccagcgatccgcgtgctgatgtcgattatctgtttgcgcaggtaatcgttcatgagcaacgtgtcgataccacgcctaactgcggcaatatgctgtctggtgttggggcattcgccattgaaaatggtttgattgcagcgactagcccagttactcgcgtacgtatccgcaacgtcaatacgggtacgttcatcgaagctgatgtgcaaacgccaaatggtgttgtcgagtacgagggtagcgccagaattgacggcgtaccgggtactgccgcaccggttgcgctcactttcctgaatgccgctggaaccaaaaccggaaaagttttcccgactgataatcagattgattattttgacgatgtcccggtgacctgtatcgatatggcgatgccagtcgtcattattccggctgaatatctgggaaaaacaggttatgaattaccggcggaactggatgccgacaaagcattattagcccgcattgaatctatccgtctacaagcgggtaaagcaatgggcttaggtgatgtcagtaatatggttatccctaaacctgtgcttatttctccagcgcagaaaggcggggcaattaatgtgcgttattttatgccgcattcttgccatcgcgcgctggcgataaccggtgctattgctatttccagtagttgtgcattggaaggcaccgtcacccgacaaatcgtcccttctgtaggatacggcaatatcaatattgaacaccccagtggtgcgctcgacgttcatttaagtaatgaaggtcaggatgccacgacgttacgcgcatctgttattcggacgaccagaaaaatattttccggtgaagtttatcttccctgaaaaaattcgttgtcaggataaggacaatcaataaaggacttctgtatgagtcatacagaaagaacaggattttaaatgaataagaaaagcttatggaagctaattctgatattagcgatcccatgtattattggttttatgccagctccggcaggattaagcgaactggcgtgggtgctttttggtatttacctggcggccattgtggggctggttatcaagcctttcccggaacctgtcgtactgttaattgccgttgctgccagtatggtggtggtcggtaacttatccgacggtgcgtttaaaaccaccgccgtattaagcggttactctagtggtaccacctggctggtgttcagcgcgtttaccttaagcgccgcatttgtgaccaccggtttaggtaaacgtattgcctatctgctgattggtaaaatcggtaacaccacgctgggtctgggttacgttacggtattcctcgatctggtactggctccggcaacaccgtctaacaccgcgcgtgcgggcggcattgtgttaccgatcatcaacagcgtggcggtggctttggggtccgaaccggaaaaaagtccgcgtcgtgtcggacattacctgatgatgtccatttacatggtcaccaaaaccaccagctatatgttctttaccgcaatggcggggaacattctggcgctgaaaatgatcaacgacattctgcacctgcaaattagctggggtggatgggcgctggcagccggattgccgggcatcattatgctgctggtcaccccgctggtgatttacaccatgtatccaccagaaattaagaaggtggataacaaaaccatcgctaaagcgggccttgccgaactaggaccgatgaaaatccgcgaaaaaatgctgctcggtgtctttgtgctggcgctgctgggctggattttcagtaagtctctgggggttgatgaatccaccgtggcaatcgttgttatggcaaccatgctgctgctgggtatcgttacctgggaagacgtggttaaaaataaaggcggctggaataccttaatctggtacggcggtattatcggcttaagctccttattaagcaaagttaaattcttcgaatggttagctgaagtctttaaaaataacctggcatttgatggtcacggtaacgttgctttcttcgttattattttcctcagcattatcgtgcgttatttcttcgcttccggtagtgcctatatcgttgctatgttaccggtatttgccatgctggcgaacgtctccggcgcaccgttaatgttaaccgcgctggcactgttgttctccaactcctatggcggcatggttactcactatggcggcgcggcaggtccggtcatctttggcgtgggttataacgatattaaatcctggtggttggtcggtgcggtactgacgatattaaccttcctggtgcatatcaccctcggcgtgtggtggtggaatatgctgatcggctggaacatgctgtaaatattctcgtcatacttcaagttgcatgtgctgcgtctgcgttcgctcaccccagtcacttacttatgtaagctcctggggattcactcgcttgtcgccttcctgcaactcgaattatttagagtatatccatttattatctttctgcgcacttcacggtgcgcagatatctggagcatttgatgatcaagttatctgaaaaaggcgtgtttctcgccagtaataacgaaataattgccgaagaacatttcaccggcgaaattaaaaaagaagaagccaaaaaaggcactattgcctggtctattctctctagccataatacgtccggaaatatggataaacttaaaattaagtttgatagtttagcctctcacgatattacctttgttggtattgtacagaccgctaaagcgtccggtatggaacgtttcccgctgccgtatgtgctgaccaactgccataacagtctctgcgccgtcggcggcactattaacggtgatgaccatgtttttggtttaagcgcggcccagcgttatggcggtatttttgtgcctccgcatattgcggtcatccatcaatatatgcgtgagatgatggcaggcggcggcaaaatgatcctcgggagtgacagccacacccgttacggtgcattagggacaatggcagtcggtgagggcggcggtgagttggtaaaacagctgcttaatgacacctgggatatcgactatccgggcgtggttgcggtgcatctgaccggaaaacctgcgccgtatgtggggccacaggatgtggcgctggctatcattggcgcggtgttcaaaaacggttacgtcaaaaacaaagtcatggagttcgttggaccgggcgttagcgcgctctctaccgatttccgtaacagcgttgacgtgatgaccactgaaacgacctgtttaagttctgtctggcaaaccgatgaagaagtccataactggctggcgctgcacggtcgcggccaggattactgccagcttaaccctcaaccgatggcgtactacgatggctgcatcagcgttgatttaagcgccatcaaaccaatgattgcgctgccgttccacccgagcaacgtgtatgaaatcgacacactgaaccagaacctgaccgacattctgcgtgagattgaaattgagtccgaacgcgtggcgcacggtaaagccaaactcagcctgctggataaagtggaaaatggtcgcctgaaagtgcagcaggggattatcgcgggctgttctggcggtaactacgaaaacgtcatcgcggcggcgaatgcactgcgcggtcaatcctgtggcaatgacaccttcagcctggcagtttacccgagtagtcagccggtgtttatggatctcgccaaaaaaggtgtggtagcagatttgattggcgcaggcgcaatcatcagaaccgcgttctgcggcccatgctttggcgcgggcgatacgccaatcaacaacggtttgagtattcgccacaccacgcgtaacttcccgaaccgcgaaggctctaagccagctaatgggcagatgagtgcggtggcgttgatggacgctcgttctatcgctgcgactgcggcaaacggtggctatttaacctctgccagcgaacttgattgctgggacaacgtgccggagtacgccttcgatgtaacgccgtataaaaaccgtgtttatcagggctttgtgaaaggggcaactcagcaaccgctgatttacgggccgaacattaaagactggccggaattgggtgcgctgactgacaatatcgtcctgaaagtgtgcagcaagatcctcgacgaagtgaccaccaccgacgaactgattccttccggtgaaacctcttcttatcgtagtaatccgattggtctggcggagtttaccctgtctcgccgcgatcccggttatgttagcagaagtaaagcgactgctgagctggaaaatcagcgtctggcggggaatgtcagcgagctgacagaggtgtttgcgcgcattaagcagattgctggtcaggagcatattgatccgctgcaaactgaaattggcagcatggtctatgcggtgaaaccaggcgatggttctgcgcgtgaacaggcggcgagctgccagcgtgtgattggcggtctggcgaatattgccgaggagtacgcgactaaacgctatcgttctaacgtcatcaactgggggatgttaccgctgcaaatggcggaagtaccaacctttgaagtgggggattacatttacatccctggcattaaagcggcgctggataatccgggtacgacgtttaaaggttatgtgatccatgaagatgcgccggtaacggaaattacgctctatatggaaagtctgactgctgaagagcgcgagattatcaaggcgggtagtttgattaacttcaataaaaaccgtcagatgtaaaaagcgccatgtgaatgtaggtcgcattcggcacttattgtcggatgcgatgcttgcgcatcttatccgacctacgaatcgcatcgaatctgtaggccagataaggcattttcgcagcatccggcacttattgtcggatgcgatgcttgcgcatcttatccgacctacaaatcgcatcgaaccgtaggccggataaggcgtttacgccgcatccggcaaatagttaattgcccttacttcttcgcctctgcaaccactttactacccacgccgcggttattgtattcccacatgcggttgtagttagtgtcattcagattgcgctgtatttcgtcgttatcatctacgctgccggtattacccgcaaacggacgattagagatcaccgcatcggcccacggtttagccgtgttaaaaccttcgttgatggcgctatcacggatcaccacctgaccgttggtattggcatcaacatccaggctgcggcccagttgcgccacaccatcaccgaaagcattgaaacggctgtttacggcgaggaaaccgtagtaaatgttggacagcgtagccggtgcaaacacatacgcttcttgctgagtacgactgttcaccacgcggaattcggtgttatcgaacaccactgcgccgcgaccagaaacgatatccacatccccttcaatgtagctgttggtcaccagcgtacgcggctgacgattcgtttccagacggttctgcacaccgctgttggtgacaaagaaggtgttctgacgaccgagaatgttaacgttgttaatctgtacctggtcaccatcagtacgcagtgccaccgccggatggttacctgcatctacgctatcgcccagcgtgttttcgatggtcagattttgcagttgcaggccattgttttgactccagaagaccgcagagcagagaacaccgatactgtcgctgcgtttgctctggcagctatcgtacatataccacgctggtttacctggcatatatttgccgcgcgggttgacgtcgtgacgccagtcggcagggctcatgccaccatcaagggaaagcccaatcttcacatcaatcggtttttcacctgtaccgtacagagtaattccacccggagcggcagggacatataccgttccctgatactcaccaggcatcacggcaatatactggcgcttgttggtacgcttgataattgccgcatctaccgccgcctgaatcgtggtatgcgttacaccttgagtgcccgccgggccgacaacaaagtcaggttgcgcaggcagggtaatcggggaaggattccacgctgcagcacctggtgtcagggatgcaaaatagtgttgagcatcgaaattctgcgcttcttttgcgctcagaatcgggcgagaagaggtaccaggcgcggtttgatcagaaggacgttgatcgggcggggtactgctacaggcggtcagcgtcacgccaaaagccaatgccagcgccagacgggaaacactaaatgtgttcacaggttgctccgggctatgaaatagaaaaatgaatccgttgaagcctgcttttttatactaacttgagcgaaacgggaaggtaaaaagacaaaaagttgtttttaatacctttaagtgataccagatggcattgcgccatctggcagagtgattaactaaacatcgcagtaatgctggcgcttgccagagagtggaaatgaacgttaaacccgaccatcgcgccgctggcaccttcatcgacatcaatacgttctatatccagcgcgtgaacggtaaaaatgtagcgatgagtttcgcctttcggcggtgctgcgccatcgtacccggttttaccaaagtcggtacgcgtctgcaaaacgccgtctggcattgctaccagaccagagccaaacccttgcggtaatacgcgggtatcagcgggtaagttaacaactacccagtgccaccagccggagccggttggcgcatccgggtcgtagcaggtgacaacaaaacttttcgttcccgcaggaacatcatcccacgccagatgcggactaatattatcgccatcgtaacccatgccgttaaagacatgacgatgcggcaatttatcgccatcgcgcagatcgttactgatgagtttcatgaaccctcctttcttgtttgcagaaagtgtagccagaaaccctcacgcggacttctcgttattggcaaaaaaatgtttcatcctgtaccgcgcggttaaccgctgcggtcagacgctgcaactgttgcgggagaataatatagggcggcatcaggtaaatcagtttgccaaaaggccggatccagacaccctgttcgacaaagaatttttgcagcgccgccatattcaccggatgagtggtttcgaccacgccaatggcccccagtacgcgcacatcggcaaccatttcggcatcacgggcgggggcaagttgctcgcgcagctgtacttcaatatccgccacctgttgctgccagtcgccagattcgagaatcgccaggctggcgtttgctgccgcgcaggccagcggattgcccataaaagttggcccatgcataaagcaaccggcttcaccgttactgatggtttctgcaacctcgcgcgtggtgagtgtggcggaaagggtcattgtgccgccggttaaggctttaccgaggcacaaaatgtccggcgcgatttctgcatgttcacaggcaaacagtttcccggtacgaccaaatccagtggcgatctcgtcggcaatcagcaagataccttcgcgatcgcatattttgcggattcgttttaaccattccggatggtacatgcgcatcccgcctgcgccctggacaatcggctcaatgatcaccgccgcgatttcatgacgatgcgccgccatcaggcgggcaaagcccaccatatcgcgctcatcccattcgccatccatgcggctttgcggggcgggagcaaacaggttttctggcaggtagcctttccacagactgtgcatactgttatccggatcgcacacgctcatcgcgccaaaggtatcgccatgataaccattgcggaaggtcagaaaacgctggcgcgcttcgcctttggcttgccagtactgcaacgccattttcatcgccacttccaccgctacggaaccggagtccgcgagaaaaacgcactccagcggttgcggcgtcatcgccaccagtttgcggcacagctcaatggctggcgcatgggtgataccgccaaacatcacatggctcatggcatcaatttggctcttcatcgccgcattaagctgcgggtgattgtagccgtggatcgccgcccaccaggagctcataccgtcaaccaggcgtctgccgtcagacaaaatcagctcgcaaccttcggcgctcaccaccggataaaccggcagaggggaggtcatggatgtgtatgggtgccagatatggcgttggtcaaaggcaagatcgtccgttgtcataatcgacttgtaaaccaaattgaaaagatttaggtttacaagtctacaccgaattaacaacaaaaaacacgttttggagaagccccatggctcaccgcccacgctggacattgagccaagtcacagaattatttgaaaaaccgttgctggatctgctgtttgaagcgcagcaggtgcatcgccagcatttcgatcctcgtcaggtgcaggtcagcacgttgctgagcattaagaccggagcttgtccggaagattgcaaatactgcccgcaaagcagccgctacaaaaccgggctggaagccgagcggttgatggaagttgaacaggtgctggagagcgcgcgcaaagcgaaagcggcaggaagcacgcgcttctgtatgggcgcggcgtggaagaatccccacgaacgcgatatgccgtacctggaacaaatggtgcagggggtaaaagcgatggggctggaggcgtgtatgacgctgggcacgttgagtgaatctcaggcgcagcgcctcgcgaacgccgggctggattactacaaccacaacctggacaccagcccggagttttacggcaatatcatcaccacacgcacttatcaggaacgcctcgatacgctggaaaaagtgcgcgatgccgggatcaaagtctgttctggcggcattgtgggcttaggcgaaacggtaaaagatcgcgccggattattgctgcaactggcaaacctgccgacgccgccggaaagcgtgccaatcaacatgctggtgaaggtgaaaggcacgccgcttgccgataacgatgatgtcgatgcctttgattttattcgcaccattgcggtcgcgcggatcatgatgccaacctcttacgtgcgcctttctgccggacgcgagcagatgaacgaacagactcaggcgatgtgctttatggcaggcgcaaacagcattttctacggttgcaaactgctgaccacgccgaatccggaagaagataaagacctgcaactgttccgcaaactggggctaaatccgcagcaaactgccgtgctggcaggggataacgaacaacagcaacgtcttgaacaggcgctgatgaccccggacaccgacgaatattacaacgcggcagcattatgagctggcaggagaaaatcaacgcggcgctcgatgcgcggcgtgctgccgatgccctgcgtcgccgttatccggtggcgcaaggagccggacgctggctggtggcggatgatcgccagtatctgaacttttccagtaacgattatttaggtttaagccatcatccgcaaattatccgtgcctggcagcagggggcggagcaatttggcatcggtagcggcggctccggtcacgtcagcggttatagcgtggtgcatcaggcactggaagaagagctggccgagtggcttggctatagccgggcactgctgtttatctctggtttcgccgctaatcaggcagttattgccgcgatgatggcgaaagaggaccgtattgctgccgaccggcttagccatgccagtttgctggaagctgccagtttaagcccgagccagcttcgccgttttgctcataacgatgtcactcatttggcgcgattgcttgcttccccctgtccggggcagcaaatggtggtgacagaaggcgtgttcagcatggacggcgatagtgcgccactggcggaaatccagcaggtaacgcaacagcacaatggctggttgatggtcgatgatgcccacggcacgggcgttatcggggagcaggggcgcggcagctgctggctgcaaaaggtaaaaccagaattgctggtagtgacttttggcaaaggatttggcgtcagcggggcagcggtgctttgctccagtacggtggcggattatctgctgcaattcgcccgccaccttatctacagcaccagtatgccgcccgctcaggcgcaggcattacgtgcgagcctggcggtcattcgcagtgatgagggtgatgcacggcgcgaaaaactggcggcactcattacgcgttttcgtgccggagtacaggatttgccgtttacgcttgctgatagttgcagcgccatccagccattgattgtcggtgataacagccgtgcgttacaactggcagaaaaactgcgtcagcaaggctgctgggtcacggcgattcgcccgccaaccgtacccgctggtactgcgcgactgcgcttaacgctaaccgctgcgcatgaaatgcaggatatcgaccgtctgctggaggtgctgcatggcaacggttaataaacaagccattgcagcggcatttggtcgggcagccgcacactatgagcaacatgcagatctacagcgccagagtgctgacgccttactggcaatgcttccacagcgtaaatacacccacgtactggacgcgggttgtggacctggctggatgagccgccactggcgggaacgtcacgcgcaggtgacggccttagatctcagcccgccaatgcttgttcaggcacgccagaaggatgccgcagaccattatctggcgggagatatcgaatccctgccgttagcgactgcgacgttcgatcttgcatggagcaatctcgcagtgcagtggtgcggtaatttatccacggcactccgcgagctgtatcgggtggtgcgccccaaaggcgtggtcgcgtttaccacgctggtgcagggaagcttacccgaactgcatcaggcgtggcaggcggtggacgagcgtccgcatgctaatcgctttttaccgccagatgaaatcgaacagagcctgaacggcgtgcattatcaacatcatattcagcccatcacgctgtggtttgatgatgcgctcagtgccatgcgtagcctgaaaggcatcggtgccacgcatcttcatgaagggcgcgacccgcgaatattaacgcgtagccagttgcagcgattgcaactggcctggccgcaacagcaggggcgatatcctctgacgtatcatctttttttgggagtgattgctcgtgagtaaacgttattttgtcaccggaacggataccgaagtggggaaaactgtcgccagttgtgcacttttacaagccgcaaaggcagcaggctaccggacggcaggttataaaccggtcgcctctggcagcgaaaagaccccggaaggtttacgcaatagcgacgcgctggcgttacagcgcaacagcagcctgcagctggattacgcaacagtaaatccttacaccttcgcagaacccactagcccgcacatcatcagcgcgcaagagggcagaccgatagaaagtttggtaatgagcgccggattacgcgcgcttgaacaacaggctgactgggtgttagtggaaggtgctggcggctggtttacgccgctttctgacactttcacttttgcagattgggtaacacaggaacaactgccggtgatactggtagttggtgtgaaactcggctgtattaatcacgcgatgttgactgcacaggtaatacaacacgccggactgactctggcgggttgggtggcgaacgatgttacgcctccgggaaaacgtcacgctgaatatatgaccacgctcacccgcatgattcccgcgccgctgctgggagagatcccctggcttgcagaaaatccagaaaatgcggcaaccggaaagtacataaaccttgccttgttgtaaccattctgtatttggttaaattgcgagcgagatcgcgtcttcgattgactgcaatttaaccaattaaattctaaaataatcacgaaaaaaattttacttccgcctcatgcggcgaatgtgggaattgcccaggcggcgggggataggggctggagacagttatccactattcctgtggataaccatgtgtattagagttagaaaacacgaggcaagcgagagaatacgcggcttgcacgcgaattggcgttaaagacggctcaaagaaatatcttttattttttaactggttagataaatgcaatggcagtcactgaacaggcatctcttgccataaaactgtcatcactcatcttgacaaatgttaaaaaagccgttgctttggggataacccggtaaggccggagttttatctcgccacagagtaaattttgctcatgattgacagcggagtttacgctgtatcagaaatattatggtgatgaactgtttttttatccagtataatttgttggcataattaagtacgacgagtaaaattacatacctgcccgcccaactccttcaggtagcgactcatgagtaaaccgttcaaactgaattccgcttttaaaccttctggcgatcagccagaggcgattcgacgtctcgaagaggggctggaagatggcctggcgcaccagacgttacttggcgtgactggcagtgggaaaaccttcaccattgccaatgtcattgctgaccttcagcgcccaaccatggtacttgcgcccaacaaaacgctggcggcccagctgtatggcgaaatgaaagagttcttcccggaaaacgcggtggaatatttcgtttcctactacgactactatcagccggaagcctatgtaccgagttccgacactttcattgagaaagatgccagcgttaacgaacatattgagcagatgcgtttgtccgccaccaaagcgatgctggagcggcgtgatgtggttgtggtggcgtctgtttccgcgatttatggtctgggcgatcctgatttatatctcaagatgatgctccatctcacggtcggtatgattatcgatcagcgcgcgattctgcgccgactggcggagctgcaatacgctcgtaatgatcaagcattccagcgtggtactttccgcgttcgtggcgaggtgatagatatcttcccggcagaaagcgatgacattgcacttcgcgtggaactgtttgacgaggaagtggaacgattgagcttatttgacccgctgaccgggcagattgtttccactattccacgttttaccatctacccgaaaacgcactacgtcacaccgcgcgagcgcatcgtacaggcgatggaggagatcaaagaagagctggccgccagacgcaaagtgctgttggaaaacaacaaactgctggaagagcagcggctgacccagcgtacccagtttgatctggagatgatgaacgagctgggctactgtagcgggattgaaaactacagccgcttcctctccggtcgtggaccgggtgagccaccgccgacgctgtttgattacctgcctgccgatgggctgctggtcgtcgatgaatctcacgtcaccattccacaaattggcggcatgtatcgcggtgaccgggcgcgtaaagagacactggtggagtacggcttccgcctgccaagtgcgctggataaccgtccgcttaagtttgaagagttcgaagcattagcgccgcaaaccatctatgttagcgcgacgccgggtaattacgagctggaaaaatccggcggcgatgtggtggatcaggtggtgcgtccaaccggattgcttgacccgattatcgaagtgcggccggtggcgacacaggttgatgatcttcttagcgagattcgtcagcgagcggcaattaacgaacgcgtactggtcaccacactgaccaagcggatggcggaagatcttaccgaatatctcgaagaacatggcgagcgcgtgcgttatcttcacagtgatatcgacaccgtcgaacgtatggagattatccgcgacttgcgtctgggtgagttcgacgtgctggtagggatcaacttactgcgcgaaggtctggatatgccggaagtgagcctggtggcgatcctcgacgctgacaaagaaggcttcctgcgttccgaacgtagcttgatccagaccattggtcgtgcggcacgtaacgttaacggtaaagcgattctctacggcgataagatcaccccaagtatggcgaaagcgattggcgaaaccgaacgtcgccgtgagaaacagcagaagtacaacgaggaacacggaattacgccgcaaggcttgaacaagaaagtggtcgatatcctggcgctggggcagaacattgccaaaaccaaagcgaagggcagaggaaaaagccgcccgattgttgagccggataatgtgccgatggatatgagccctaaagcgttgcagcagaaaatccatgagctggaagggttgatgatgcaacacgcgcagaatctggagttcgaagaagcggcgcaaattcgtgaccagttgcatcagctgcgtgagctgtttatcgcggcaagctaacaggatagcgaagaagactgatgacaaacggaaaacagcctgatgcgctacgcttatcaggcctacattttctccgcaatatattgaatttgcgcggtttgtaggccggataaggcgttcacgccgcatccggcataaacaacgcgcactttgtcttcaataggaagccggaattttccttcggatttccgttaacctaaagcctgtaacgccttttccagcgcgttatgtaacaactggcggtcatgacgatacggaatatcgctggcctccagtacctcctggatcacaatccgctctttcaccgcgctgacatccacttttggcccgacgatgaccgcatcaatgacctttttaccaacatactgctccataattgccagcttgctttccagcttcaaattagccgcaggtaaactcaactcacgccccagattgccgatataaaccatcggcgctggcgtgcggcgtaatgcctgggcgatttccttcagcagcagaattggcatcaggctggtataaaaactgccaggcccaataatgatgagatccgcttcattgatagcgtgaaccgcctcacgcgttgcgggtacattaggcgttaacaataactcttgaatcggcgtagttaactggtcgatattgacctcgccgtaaacttcatgcccctgatcgtcaatcgccatcagatcaacaggatgctcactcattggaatcaaatgcgtatccactttcagcagattacgaattaaattgatggcttccagaggccgcacgctaaggtgatccagcgcctttaacatcaagtttccgagattatgaccggaaagttcgccattgccaccaaaacggtattcaaacatcgcggaggcgacgctcggttccgttatcagctggttgaggcagttgcgcatatcgccccaggcaatgccgccttcactacggcgaatacgccccgtgctgccaccattatcggtggtggtgacgatacccgttaaacgagaacccaaagagctaagactactgagaacgcgtcccagtccatgccctccgccgagagcaacgacacgatcaagatcagccagcgtacgattgcgcatatagtttcctggagtcagattatccgcgctacagtagcgcaaattgcggggaaacagcaattaacctgccaatattgaggatacaaactattttcttctacctctaaaggacgatgcacgctatgcctccctgatgatgtatatcaaagtaaaaccgccattttcccttattctgtagcgaaatagcacgatcatgacgctatatacatgattacatagcgaaagtgtggatggtaaaaatctcatttacacgctagtatcggcataaccactaaacactctagcctctgcacctgggtcaactgatacggtgctttggccgtgacaatgctcgtaaagattgccaccagggcgaaggaagaaatgacttcgcctcccgtatctggaaaggtgtacatggctagtcaactgactgatgcatttgcgcgtaagttttactacttgcgcctgagcattaccgatgtgtgtaactttcgttgcacctactgcctgccggatggctacaaaccgagcggcgtcaccaataaaggctttcttaccgtcgatgaaattcgccgggttacgcgcgccttcgccagactgggcaccgaaaaagtgcgcctgacaggaggagagccgtctttacgccgcgactttaccgatatcatcgccgctgtgcgggaaaacgacgctatccgccagattgcggtcacaaccaatggttaccgtctggaacgcgatgtggcgagctggcgcgatgcgggacttactggcattaacgtcagtgtcgacagtctggacgcccgccagtttcacgctattaccgggcaggataaattcaaccaggtcatggcagggattgatgctgcatttgaggccggttttgagaaggtcaaagtcaataccgtgctgatgcgtgatgttaatcatcaccagctcgacacctttctgaactggatccagcatcgccctatccagctgcgtttcatcgaactgatggaaacgggcgagggcagcgagctcttccgtaagcatcacatctctggtcaggttctgcgtgacgagctactgcgtcgcggctggatccaccaattacgtcaacgcagcgacggtcccgcgcaagtcttttgccatccagattacgccggagagattggccttatcatgccgtatgaaaaagacttctgcgccacttgcaaccgcctgcgcgtttcctccattggtaaactccatctctgcctgtttggtgaaggcggcgttaacctgcgcgatctgctggaagacgatacccagcaacaggcgctggaagcgcgtattagtgcggcgctgcgggagaagaaacagacccatttcctgcatcaaaacaacaccggtattacgcaaaacttaagctacattggcggctaaaacgtcaaaaggagagatcagatgagtcaggtaagcactgaatttatcccgacccgtattgctattcttacggtttctaatcgtcgcggtgaagaagacgatacctccggtcactatctgcgcgatagcgcgcaagaagcgggccatcacgttgtcgataaagccattgtgaaagaaaaccgctacgctattcgcgctcaggtatctgcgtggatcgccagcgacgatgtacaagtggtattgattacgggtggtactggcctgacggaaggtgatcaggctcccgaagcattgctgccgttgttcgaccgtgaagttgaaggttttggtgaagtgttccggatgttgagctttgaagagattggcacttccacgttgcaatctcgtgcggtagcgggcgtcgccaacaaaacgctgattttcgccatgccgggtagcaccaaagcgtgccgtaccgcatgggaaaatatcatcgcgccgcagctggatgcccgtacgcgtccgtgtaatttccatccacatttgaagaaataagtatgagccaactgacccatatcaacgccgctggcgaagcgcacatggtggatgtctccgccaaagcggaaaccgtgcgtgaagcgcgggcggaagcctttgtcaccatgcgcagcgagacgctggcgatgattattgatggtcgccaccacaaaggcgacgtatttgccactgcgcgtattgccggtattcaggcggcaaaacgcacctgggatctgatcccgctctgtcatccgctgatgctcagcaaagttgaagtcaatttacaggccgagccggagcacaatcgggtgcgtatagaaaccttatgccgcctgaccgggaaaaccggtgtcgaaatggaagcattaaccgcggcctccgtggcggcgctgaccatttatgacatgtgcaaagcggtgcaaaaagatatggtgattggtccggtacgtttgctggcgaagagcggcggcaagagcggtgactttaaggtggaagcggatgattaaagttctttttttcgcccaggtgcgcgagttggtgggaacagatgcaaccgaagtggctgcggatttcccaactgttgaagcgttacgccagcacatggctgcgcagagcgatcgctgggcgctggcgctggaagatggcaaattactggctgccgtcaaccagacgctggtgagttttgaccatccgctgactgacggcgacgaagtagctttcttcccgccggtaaccggaggttaagatggcagaaaccaaaattgttgttggtccgcagccgttcagcgtaggagaagagtacccgtggctggcggagcgtgacgaagacggtgcggtagtcacctttactggtaaggtgcgcaaccataacctgggcgacagcgtcaacgcattaaccctcgaacactatccggggatgactgaaaaagcactggcagaaattgttgatgaagcgcgtaaccgctggccgctggggcgcgtcactgtgattcaccgcatcggggaattatggccgggcgatgaaatcgtttttgtcggtgtcaccagtgcgcatcgcagcagtgcgtttgaagccgggcagtttattatggattatctcaaaacccgcgcaccgttctggaagcgcgaagccacgccggaaggcgaccgctgggttgaagctcgggagagcgatcagcaggcggcaaaacgctggtaattttttgttagccggataaggcaccgctgcgtccggcaatttcaccgctcagtacatacgtttacgctgcgtcgatgcacagcctcatcattttgcagtatccttaagatattccttatatcttcaggagatcgtcatggacagattcccacgttctgatagtatcgtacaaccccgggctggcttgcaaacttatatggctcaagtctatggctggatgaccgttggcttgttgctgaccgcatttgttgcctggtatgcggctaattccgcggccgtgatggagctgttgttcactaaccgtgtctttttaatcggtctgatcatcgcgcaattagcattggttattgtgttaagtgcgatgattcaaaagctgagcgcaggtgtaacgacgatgctctttatgctttatagcgcgctgacgggtcttacgctttccagtatattcattgtctataccgctgcttctatcgccagtactttcgtcgttactgccgggatgttcggcgcaatgagcctgtacggttacaccacgaagcgcgatttaagtggctttggcaatatgctgtttatggcgttaatcggcattgtgctggcaagcctggtcaacttctggttgaaaagcgaagcattgatgtgggcagttacctacatcggcgtgattgtctttgtcggattgacggcgtatgacacgcagaaactgaaaaatatgggtgagcagattgatacccgcgacacgagcaacctgcgcaaatattccattcttggcgcgttaaccttgtatctggacttcatcaacctgttcctgatgttgttgcggatcttcggcaaccgccgttaattctttttcaccatcactatcccggccatgtgtcgggatttttttcttactaaaaacgacacttaacaagtaccaggtataaaatatgccttatggacgagcggaagcgttttctgtatccataaatgcaaaagtattttgtatgcgtggttttaaatttattgatggtgaatattaatattttttctaaggataactaaaagaatggaaagttacagccaaaacagcaataaattagattttcagcacgaggccaggatattaaacggtatatggctcattaccgctttaggtttggtggcaaccgcaggactagcctggggagctaagtatatcgaaattacggcaaccaaatatgatagtccaccaatgtatgtcgccatagggttattattactttgtatgtatggcttaagtaaggatatcaacaagataaatgccgccatcgcgggcgtaatatatctgtttttactctctttggtggcgattgtcgttgcaagtttagttcctgtatatgccattatcatcgtgttcagcactgcgggcgcgatgtttttaatcagtatgctggccggtttattatttaatgttgatcctggttctcaccgttttatcattatgatgacgttgacagggttggccctggtaatcatcgtgaatgcggcattaatgagtgaacggcccatttggataataagttgcttaatgattgtgttatggagtggcattatcagccatggacgaaataagctccttgaattggcggggaaatgccatagtgaagagttgtggagtccggttcgttgcgcttttacaggtgcattaacactctattactattttatcggcttctttgggatacttgccgcgatagctataacgcttgtctggcaaaggcatacgcgtttttttcattaaccgtaaatgcacatactaaagaacttaactaaacttcacatcgccgcttcatttttcgcccgtagcttcttcgcctggctttccagcaacaggtaacagatcagcgccagcagcagtgggataaagtaatacagcacacggtaagcgagtagggcggcgataattgtacctttggaggtatgctccccagccagtagtgcgataaacaccgcttccagcacaccgatccccgccggaatatgcacgatgacgccagcaatactactaaccagtaacacgcccagtacaaagaaatagttcacgctttgaccaagtaacagccagataatcgcccccattaccatccagttaacgctggaaatcagcatctgagcgagggcgaatttccaactaggcagcaccagcttttgccctttgatggtcatatggcggtgcttcgcgaaagcgcaaaaccacaaataaaccgcgataatcatcagtaagccaatgccgagaatacgcagcgtagtttgatcgacataccagtgatccggcaactccaccacgcctgcggtaaagataatccctgccagtaaaatgtagcccagccagttggtggtaatactgaggctgaaaatccgcgtaatagtgctaccgggcaaccccagacgagagtacaaacgatagcgcataccaatgccgccgacccaggtactgagcgtcaggttgaaggcgtagcagataaagctcaccagcatcacctggcgcttcgccagtttgtgaccgcagtaaaagcgggcgagcaggtcatagcagccgtaaatcagatagctgacgaccaccagcccgaccgcactaagcagcgcaacgcgattgtagtcgcggatgaccttccagacctcttcccagtccacttttttggcgtagaccaccagcaacacaatcaccgcgataaaaaacagccaggtgaggatcttctttgctaagcgccagcgcgggtgacttttactcatcagggttttacccccgtgttttcagtttctacccgatcctgcgtttccattgtcggttgtgcgggcggatcaacctgcgccagacgtggcgtgtgtgccggaagccagccaaccagcgccgggaagtggcgtaaaaagtggaacgccagcacgcttttggtcaggttccaccaggtgcgtttgggcagcatggtttcatccacctgctgacaatctgcggcaataatgccgttcagattatcgcgcagcgtctggttaaaatgacgatcgtggatgatgacatttgcttcgagattcagactcaaactgagcggatcgagattactggaccctactgtcgcccagtgatcgtccatcaatgccactttgccgtggagcgggcggcggcggtactcaaaaacctgaacgccgcctttaaccagatagttatacagcaagcgcgcaccgactctgacaatcggcatatccggttcgccctgaatgatcagtttgatccgcaccccgcgccgtgccgctttacgcaaggcgtgtaaaaatcgatagccggggaagaagtaggcgttggcgataatcacttcccgccgcgcctgagtgagcattttcaaataatggcgttcaatatcatcgcgatgttcttcgttatcgcgccagaccagcaatacctgcgcttctcccggctggcggttctcttccgctttgtgatgacgtcgccaccagcgtcgtgccgcgctctgtccaggcaggttttccagctcaaactggagaatatcttcgacaatcggcccttcaaggcgtaccgcgtaatcctgtttagcctctggaccgtagctggacatatgctcggcggagtaattcagcccgccaataaaggctatacgcgcgtcgatcaccacaattttgcgatgcatccggcgaaacacattggtgcgcataccaaaaaggcgagggcggggatcgtagtagcggaacactacgccagctgccgtcagttcattgacaaactcatcgctgagatccgggctaccgtagccatccagcaagacttccgctttaaccccgcgttgcgctgctgccagtagtgccgcatgcagttgtttgccgacgtcatcctcaaaccagataaacgtttcaagaatgatgcgttcttgtgcctcgccaatcgccttaaacaccgcgggataatattgctcgccgttttccagcaactggatcttattgccttcgcgccagctacatttcataaatgaatctccgcacttaaaggggcatgatcagaaaggtgtcgccatgtccgcagcggcaacgcggttggcgcgctggcgctggcatttttgacgtagatcctgtccagtcgtagtagaggaaattgcaccggaaacgtgcgcgccgggcgtccgtgggcgcgggtaaaaatctcatccagtccggcctgcacttttaacggatgattagctttttgccgccagtcattgaaatcacccgccaccaataccggttcgccgtccggtagctcattcacccattcggcgagcatcgcaagctgcgcctgacggtgcgcctcacgcaggcccagatgtacgcacatcacatgaatcgcttttccggtcatcggcggcacaatgcggcagtagagcacgccgcgcttttccgcaccatcgacgctaacatcgcgattctcataatgttcaatgggataacggctcagtacggcgttgccgtgatgcccttccgggtatacggcattgcgaccgtaggcaaaatcgctccacatagtgtcggcgagaaactcgtagtggctggtatcgggccagttttccacatgcagcggatgaacttcgtgcgcgcccatcacttcctgcaggcaaacaatatcggcgctgacggtacgcacggcgtcgcgaagttccggcaaaatgaagcgtcggttaaacgcggtaaagcctttgtgaatattgatggtgagcaccttgaagctaaattgttgtgtttgatcgggcataattttcctgtctttgcctcttatctcattgaaatagtgtagtcggcgtcacaaaaaggtgcggtcttacggaattttccgtaaagttcggtactctgagtaagtagagataaattcttcaggagagaagccatgaagtggcaacaacgtgttcgtgtcgcaacgggtctaagttgctggcagattatgttgcatttactggtagtggcgctgctggtggtgggctggatgagtaagactctggttcacgtcggcgtgggattatgcgcactgtattgtgtcacggtagtgatgatgctggtgtttcagcgccaccccgagcaacgctggcgtgaggtggcagacgtgctggaagagctgaccacgacctggtattttggcgcagcgctgattgtgctgtggctgttgtcccgcgttctggaaaacaactttttgctggcaattgcagggctggcaatccttgccggcccggcggtagtgtctttgctggcgaaagataagaagttacatcaccttacgtctaaacatcgcgtacgccgctgattacatcaccttacgtctaaacatcgcgtacgccgcactccctgtcgtggccgttatcaccagtagcggccacaaactattccacacaatatccagactcgcatccttcaaataaatctgcttggtaatgtccgtaaagtggcgaatagggttaatccacgtcaggttttgcagccataccggcatgttttccaccggagaaacgtaaccggaaaggagaatggcgggcatcataaagacaaacacgccgataaacgcctgctgttgtgtactacagagactactaatcaacagaccgaatcccaccaggcttaaaccataaatcaccatcgtaaagtagaacagcgccaggcttccggcgaaggggatttgatacgcccagataccaatcgccagcacaatggtggcctggaaggtggcgacaattaacgccggtacggctttgccgatgaagatctgccaggtggtgagcgggctaaccagtagctgatcgagcgtaccttgttcacgttcgcgggcgacggaaagactagtgacgatcattacgccgatagtggtgatcatggcgatcagactcggcaccacaaaccatttgtagtcgagattcgggttataccagttgcgtaccaccagctcgctgttgttaggtttcggttttccttccagcagctcctgctgataatttttgacgatctgttgcaggtagttggcggcaatttgcgcactgttggagttacgcccgtcgaggatcaactgcaaaggcgcggtctggaaggtatccagtttgcggctgaagtcagccgggaaacgcaccagtagtaacgccttttgtgtgtcgatggttgggcggatctcctgtgggcttttcagcagcagcacatgagtaaaggcgctggcgcgggcaaaacgttgggtcagctccacgctatgctcgccgttatcttcatcgtagatggcgatggtggcgttagtcacttccagcgtggcggcgaacgggaacaggatcacctgaattagcacgggtaaaatcagaatcgcgcgggtttgcggttcgcgcagcaagctctgcaactctttgcggattaacgtccataagcgatgaaacatgctcttctccttaatccagccgacgtttggttttcagccacgtcaggccgataaacatcaccgcgctagcgatcaaaaacagcacgtttaccaccagcaccactggaatattcccggcgaggaacaggctttgcagggtgctgacgaaataacgagcgggaataatgtacgtcaccgcgcggatcaccgcgggcatactgtcgatctgaaaaataaagccggaaagcataatgctcggcagaaaagcggcgttcagggcgacctgagcggcattgaactggttgcgggtaatcgtggaaatcagcagccccatccccagggtactgagtaaaaacaggctggagataaaaaacagaatcagcaggctcccgcgatacggcacgccgagaataaacacactcaccagcatacacagcaacatcgccagcatcccgagaaagtaataagggatcagcttacacagcagcagttccgtgcgggtaatctccgtagagagcagagcctccatggtgccgcgttcccattctcgcgccaccaccaggctggtgagaatcgcgccgatgaccgtcatgataatggtcaccgcaccggggataatgaagtgctggctaatcgccgccgggttaaaccagtagcgggtttgtacatcaataagcggttcaaaagtctgcccgttgtcctccgctcgctgcatttgccagatctgccagatcccttcgacatacccctgtacaaagttagcggtattcggctcactgccgtcggtgatcacctgaatcggtgcggtggcgttggcgcgctccatctgttccgcaaaatccaccggaataaccaccagaccgcgaattttccccgcctgcattttggcgatcagttcctgacggttatcgctgatggtggcgtcgatgtaggggctaccggtcatggtgtgggtgaaatccagcgccgcttcgctacgctgttccagtaaaatcccgacccgcagcttgctggagtcgaggttaatgccgtaaccaaaaataaacagcagtagcagcgggatcactaccgcaatcagccagctactcggatcgcgaacgatctgccgcgtctctttaacgcacagcgcccgtacgcgacgccaggacaggatcgggttactcattgctatgctccttatcccagtcgtggatcaactgaataaaggcttgctccatggtgggatcgggttgctcatcgttagcgctctgtgctttcaaatcgtccggcgtgccgctggcgattaatttcccgcggtacaccaggccgatgcggtcgcaatattccgcttcatccataaagtgggtggtgaccatcaccgtgacgcctttctctaccatgctgttgatgtgcagccaaaattcacggcgggtgagggggtcaacgccggaagtcggttcgtcgagaaacagaatgtccggttcatgcatcaggctacaggccagcgccagccgctgtttaaaacctaatggcagttcatcggtggcgtgggaggcgatacttttcaggccgaacgcctcgctcatgcgggagattttttcgttctgcgcccgaccgcgtaagccatacacaccagagaaaaagcgtaaattctgttcgaccgtcaggttaccgtagaggctaaatttttgcgccatatagccgagatgctggcgcgctttaccggaactctctttcagatccatccccagcaccagcgcctggccggaagtcggcaccagcaaaccgcacatcatcttaaaggtggtgcttttacccgcgccgtttggccccagcaaaccaaaaatctccccacgtttaacggcaaagttgacgtgatcggtggcggcaaaatccccaaatttcttggtcagttctttcgcttcgatcaccgtctcgccgggtgtgccttctaccgtatgtaatattgcgcccagcgggctttcgctggttccggcaccgcccagcaaatcaataaacgcatcttcaaaacgcggcgtagtttcgttgatgttgatttccggcatcccgtcggcatggcgaatatcgtctggtgtggcctcttttttgaggatcagacgtacgcttttcccctgaatcatgccgtcgctgacctgcggcagtttcaaggcgcgttgcaacagtttgcggttgccctcgtgtggactggtcatcagaaagctgcgtccggccatggtttgtgtcagggcttttggttctccctgatacagcaactcgccttcgttcatcagtaacacgtcacggcactgctcggcttcgtcgagatagctggtactccagaggattaacatcccttcgcccgccagctcatgcaccatctgccacagttcgcgccgactgatagggtcaacgccgacgccgggttcatcgagcagcaacactttcggttcgcccaccagggtacaggccagaccgagtttttgtttcatcccaccggagagcttgcccgccaggcgtccggtaaacggcccaagagacgtaaactccagcaggcgagcaaaagtttgcttacgtgcctcgccggtgacgctgcgcaaatccgcgtacagattgaggttctccatcaccgtgagatcttcatacagaccaaatttctgcggcatataaccgagcacggcgtgcagcgcgccgtcgtttttgatcggatcaaagccaatcaccgtggcactgccgctgtcgggtttcagtaatcccgccaacatccgcatcagcgtggttttacctgcaccgtccggccccaccaaccccgtcacataaccggcgtgaatggtacaatcgagcggcgcgacggcgggcttgtccatgcccggaaagcgtttttccaggccgttcagcgtgataacggcatcattcatgtcctgcctcgtcaccgaattgtaccgtcactggcattccctggcgtaacgcatcatcggcgtcggtcaccacaatacgcaggcgatagacgaggtcggtacgcagatccggcgtttcgacggttttcggggtaaattcagcagtcgggctaacgaaaccaatctgcccgtgatacggcttgtccgggcgaccatcggtataaagcagcactttgcgccccggctgggcctggtcaagattacgttcatcaacataagcgcgcacccacaccggacgcgttagactaacggtaaacaccgtgccaccttcattgaggaccgtgcctggctccaccgcgcgcgttaacagcgtgccatcagacggggctatcaacgtactgtcctgtaaattcaactccgcctgcgccagttgcgcctgcgcctgttcgaggctggctttcgcctgagcgatgtcctgttcacggttaccggaacggtactgacgcaatttatcctgtgcacttttcagcgttgcctgcgcctggtcgcggctggagcgggcattttccaggtcatttgcgctaatagtgcggcttttccacaacccttgctggcggttatagaagttctgcgcatagtcataggcggcttgcgcctgtttcaccgctgcggcggcctgagcgatttcttcattgcgatacccggcaagcatcaggtcatactgcgcctgtgccacgctaacacccgctttcgcctgcatcagggcaatctcatacggcttgtgatccagttcgcccagcacctggcccgctttgatagcatcaccttcgtccaccgccaggctttcaacgcgccccccaacacggaaactaagatttaccgtacgaatatccacgttgccatacagcgtcaggccgttatcctggcggctttgataccaccagtagcctccggcaaccacggcggcaagtaccactaccgccaatccgatcacgacaggttttttcatcactacaaactcctttgcgataattacaaactcctttggcttaatccttgcaaaatcaggtcgatatgacaggtcaccgtctggttgatcagttcggtcttttcttcatcgaacgcggtccagccggtacgtaacagaattgtttctttgccaagacggaacgccagaatctcaccaatcaacgcatgggtatgaaggatcatgcgggtgtcattggcgtcgcagccggtccaggcggcaatcaggcgtgtcaggtggctgtgtagcggactaatcacctgttcgtgcaccaggtggtaggctgccgtgggagagagctgctcacgggagataaacttgctgaggttgacggtgtcatcctgggtgagcagcttaatcatgttcctgcaggcgcgaaggatcagttcacggatggcagcccgatcaggctgtggttgcgcgaacaagcgttcggcttcctcggcatgcggacggaactgctcgccaataaaatcggcaatccactgggcgcaggcgaggtacaaatcttctttgctaccgaagtagtaggtgatggcagcgatattctgcccggcctgggcggctatctcgcgagtggtggcgttcattccatattcaccaaactgcgccagtgcggcagcaatcagctgttttttcgcctgttcacccttgattgtcatggcaggattattcatcgcacagtccattcttaatcaaatgattgattaagattatgactccataggggagttgtccagtatggctaagaattttagcaacgccagtcacagggataatttatgcgctgcgtcacaaaaactgctacactccgctccctcatgacattgtggtttttgtcattttccttttcagtatctccctgaaaactacaccggtaacggtcggggcggttcggagtagttatgtctttcgattctttgggtttaagccctgatatcctgcgcgccgttgccgagcagggttaccgtgaacccacccctattcagcagcaggcgatccctgcggtgctggaaggccgcgacctgatggctagcgcccagaccggcaccggcaaaacagcgggctttacgctgccgctgttgcaacacctgatcactcgccagccgcacgccaaagggcgtcgtccggtacgtgcgctcattcttaccccgacccgtgaactggcggcgcagattggcgaaaacgtccgtgattacagcaaatacctgaacattcgtagcctggtggtgtttggtggtgtgagtattaacccgcagatgatgaaactgcgtggcggcgttgatgtgctggtggcaaccccgggacgtttgctggacctggaacatcagaatgcagtgaagctggatcaggttgaaatcctcgtcctcgatgaagctgaccgcatgctcgacatgggctttatccacgatatccgtcgcgtgttaacaaaactacctgcgaagcgccagaacctgttattctccgcgaccttctctgacgatattaaagccctggcggaaaaactgttgcacaacccgctggaaatcgaagtggcacgccgcaataccgcgtctgatcaggtgacccagcacgttcactttgtcgataagaaacgcaaacgcgaattgctgagccacatgattgggaaagggaactggcagcaggtgctggtgtttacccgtaccaaacacggcgctaaccatctggctgaacagctcaataaagatggcatccgtagtgcggcgatccacggcaataaaagccaaggtgcgcgtactcgtgcgctggctgattttaaaagcggcgatattcgtgtactggtggcaactgacatcgctgcgcgcggcctggatattgaagagctgccgcacgtcgtcaactatgaactgccaaacgtacctgaagattatgtccaccgtatcgggcgtaccggtcgtgcggctgctaccggtgaagcgttgagcctggtgtgtgttgatgaacacaaactgctgcgtgatatcgaaaaactgctgaaaaaagagatcccgcgcattgcgattccgggctatgagccggacccgagtatcaaagccgaaccgatccagaacggtcgccagcaacgtggcggcggcggtcgtgggcaaggtggtggtcgcggtcaacagcaaccacgccgtggggaaggtggcgcaaaatctgcaagcgcgaaacctgcagaaaaaccgtctcgccgcctcggcgatgccaaaccggcaggcgaacaacaacgtcgccgccgtccgcgtaaacctgccgctgcgcagtaatcttttatgccgggctatgcccggcatcaggctgatgaacaaacgcaaaactgcctgatgcgctacgcttatcaggcctacgtgaactctgcaatatattgaatttgcatgcttttgtaggccggataaggcgtttacgccgcatccggcatttcacaacaagcacttgtcagcaatttgagaacacgggaaaaaatttatctgttttaccgcccataagccaccgagacgttacttctctatagccaattgttcgcgcaactccattaaaaggtagcccagtcgattcttgcccttaccatgaccaccgtctccccagtaagcatcgttttccgtatgctcaaccagttttgcgggcgcggttgccagcaagagcgcacgcagttctgcatgctgttcgaatttagcgcgaagtgcttttcgcatcacctgttctttgacgctctcccagtttttacgcagaggcttagaacgatcgcgccccatgcgtgcggcgaccataggggaagaaacccgacggatctcttcgcggtatttttcatcaaggaatttttgtgcctgaaaatagtgttcactggtaggccaggttttcccgtcaaccttgatgggccaggcggcaaagttagaaaaatcaccgtagtcatcgctggtgctgtagaaatttatgatggtgtcttgcatgacgtgttggatcctttgtgctcgaacgggcattaaaccgcattatgttggtggttattgcgagccgctttccagaaacagaaaaaccattacccctgaaaaccgaaaaatgccacaatattggctgtttatacagtatttcaggttttctcatggcattaaccgccgcgcttaaagcgcaaattgccgcctggtataaggcgcttcaggaacagatccccgactttattccccgtgcgccgcagcggcagatgattgcggacgtcgccaaaacgctggccggagaagaagggcgacatctggcgattgaagcccccaccggcgttgggaaaacgctctcttatttgattcccggcatcgccattgcccgcgaagagcaaaaaacgctggtggtgagtaccgccaacgtggcattgcaggatcagatttacagcaaagatttaccgctgctgaaaaagatcattcccgatcttaaattcactgccgcttttgggcgtgggcgctacgtttgtccgcgtaatctgacggcgctcgccagtactgaacccacgcaacaggatctgctggcgtttcttgacgacgaactgacgccgaacaatcaggaagagcaaaaacgttgtgcgaagctgaagggcgatctcgatacttataaatgggatggtctgcgcgatcatactgatatcgctatagatgacgatctctggcgtcgtttaagtaccgacaaagccagctgcctcaaccgcaattgttactactatcgtgaatgcccgttttttgtcgctcgtcgggagattcaggaagcggaagtggtggtggcaaaccatgcgctggtgatggcggcgatggaaagcgaagcggtattgcctgacccgaaaaatttactgctggtgctggacgaaggccatcacctgccggatgtggcgcgggatgcgcttgagatgagcgccgaaatcaccgcgccgtggtatcggctacagctggacttgttcacgaaactggtcgctacctgcatggagcagtttcgcccgaagaccatcccaccgctggcgatccctgaacgtttgaatgcgcattgtgaagagttgtatgagcttatcgccagcttaaacaacattctcaatctctacatgcctgccgggcaggaggcagagcaccgttttgcgatgggcgaactgccagatgaagtgctggagatctgccagcggctggcaaaactcaccgagatgctgcgtggcctggcggagttatttcttaacgatttaagtgagaaaaccggcagccatgacattgtacgtctgcatcggttgattttgcagatgaaccgcgcgttggggatgttcgaggcgcaaagcaaactctggcggctggctagcctggcgcaatcttccggtgcaccggtgaccaaatgggcgacgcgggaagagcgcgaagggcagctacacctctggtttcactgcgtgggaatacgtgtcagcgatcagctggaaaggctgctgtggcgcagtattccgcacattattgtcacctccgcaaccttgcgtagcctgaacagttttagccgtttgcaggagatgagtggtctgaaagagaaagcgggcgaccgttttgtggcgctggattccccctttaaccactgcgaacagggcaaaattgttattccccggatgcgcgttgagccttccatcgacaacgaagagcagcatattgccgaaatggcggcctttttccgtaagcaggtggagagcaaaaaacatctcggtatgttggtactgtttgccagcggacgggcgatgcagcgctttctcgactatgtgacggatttacgtctgatgttgctggttcagggcgatcagccgcgttaccgtttagttgaactgcaccgcaaacgcgtcgccaacggtgagcgcagcgtgctggtgggcttacagagttttgccgaagggcttgatttgaaaggtgatctgctcagccaggtgcatatccacaaaatcgcttttccgcccatcgacagcccggtggtgatcaccgaaggggaatggctgaaaagcctcaaccgctatccgtttgaggtgcaaagcctgccgagcgccagctttaacctgattcagcaggttgggcgactgattcgaagccacggttgctggggcgaagtggttatctacgacaaacgcttgctgaccaaaaattatggcaagcgactactggatgcattaccggtatttccgatagagcaaccggaagtccctgaaggtatagttaaaaagaaagaaaaaacgaaatccccacgccgtcggcggcgttaatgatgtgagtcaggtaaggagtcgtaaatggactatcgcaaaatcattaaagagatcgggcgcgggaaaaaccacgcgcgcgatttagaccgggatactgcgcgcggtctgtatgctcatatgctcaatggtgaagtccctgaccttgagttgggcggcgtattgattgcgctgcgtatcaaaggagaaggggaagcagagatgctcggcttttacgaagccatgcaaaatcacaccatcaagctgacgccgccagcaggcaagccgatgccgattgtcatccccagttacaacggcgcgcgtaaacaggccaacctgacgccgttgttggcgattctcctgcacaaactcggttttcctgtggtggttcacggggttagcgaagatccaacccgcgtgctgactgaaaccatttttgaattgatgggtattacgccaacgttgcacggcgggcaggcgcaggcgaagctcgacgaacatcaaccggtgtttatgccagtcggcgcgttttgcccgccgctggaaaaacaactggcgatgcgctggcggatgggcgtgcgtaacagtgcacataccctggcgaaactggcgacgccatttgccgaaggtgaggcgctgcgtctttccagcgttagccatccggaatacattggacgcgtcgcgaagttctttagcgatatcggcgggcgggcgctactaatgcatggtactgaaggtgaagtgtatgctaatccgcagcgctgcccgcagatcaatctcattgaccgtgaagggatgcgggtgctgtatgaaaaacaggacactgctggtagcgagttactgccacaagcaaaagatccggaaaccacggcgcagtggattgagcgttgccttgctggcagcgaaccgattcccgaaagcctgaaaatccagatggcttgctgcctggtggctacgggtgaagcggcaactatcagcgacggcctggcgcgcgttaatcaggcattttaattcttttctcagccggatgagccatgtcatccggcttttaccccaccgcaatatgaaattcctgcatctttattgaccttcccacgcccggcgtgcagcataaaaatacaacaaacacataacataaacaggagttaaccatggaaagtggtcatcgctttgatgctcagacgctgcacagttttattcaggctgtatttcgtcagatgggtagcgaggaacaagaagcgaaattagttgccgatcatttaatcgcggcaaacctggcagggcatgatagtcatggtattggcatgatcccaagctatgtacgctcctggagtcaggggcacctgcaaattaaccatcatgccaaaaccgttaaagaggcgggggcggcggtcacgctcgatggcgatcgcgcatttggtcaggtcgcggcacatgaagcgatggcgctggggattgagaaagcgcatcagcacggtattgccgccgtggcgctacataacagccatcatatcggccgtatcggttactgggcggagcagtgtgcagcggcggggtttgtctctatccactttgttagcgtggtcggtattccaatggtcgcgccgttccacggtcgcgacagccgctttggcaccaatccgttctgtgtggttttccctcgtaaagataatttcccgctgttgcttgattacgccaccagcgccattgcatttggcaaaacccgcgtcgcctggcataaaggcgtccccgtgccgccaggttgcctgattgacgttaacggcgtgccgacgaccaatccggcggtaatgcaggagagcccgttgggtagcctgttgacctttgccgaacataaaggctacgcccttgcagcgatgtgtgaaattcttggcggggcgctttccggcggtaaaacgacgcatcaggaaacgttacaaaccagtcccgatgccattcttaactgcatgaccactatcatcatcaacccggaactcttcggcgcgccggattgtaacgcgcagaccgaagcctttgccgagtgggtgaaagccagcccgcatgatgatgataagccgattttgctaccgggcgagtgggaagtgaacacgcgtcgcgaacggcagaagcaggggattccactggatgcgggaagctggcaggccatttgtgatgcagcgcggcagattggtatgccggaagagacgttgcaggctttctgtcagcagttagccagctaaaaaaaagcccgtccagtggcggacgggcaaacaagggtaacataggatcaatgagggttagagcatatgcgtctgtcggcaaacagacagggaaatacttgtgctggacgtagcgtaaacgcctgatccgtccaacggttcggattttgtaggcctgataagacgcggtagcgtcgcatcaggcatctgttgccggatgcggcgtaaacgccttatccgtcctacgaattacttataaattaccgcagtaccgcttaatttattgttgttggtggcggaagtgatgctgtatccactggcaccggctgccgcggctttctcagccagtttcgcttccagggcatcgagggtggatgcgccatcggcagaaaccacgccgattttattcatgttctgtgcctgggatgccgttaccggttccgccgcgaacacgccaaaactcagagtactaagagccatagcagcaacaacagtattgatagttttcataattaatctctcgcaggtgatttttgtataagtgacgttgtttcgtcgatgtgatgagtatcacgtttttttacgagagataaaatcgaagagaattgaccgccttgttcaaataaattgattgatatctaacctactgataaaccatttatttgttgtacttatgaacttgttttataccgcgtggcagtcacagcagcgttaaaggcacggaatgacacgcaaaatacaaattatactcgctatgcatctcgccagttgtagttaacgtaactggctgtctttgctacctctgcgattatatcctgtataagctggtttttgtaaatctttctcctgctgacaatgaatacataagcgcacgccaggaatggcttcccgacgggcctgcgggatgggggcaccgcactcttcacattcatccaggctttcgccgcgcggaatttcaccccgagcgcgggcaatcgcatcttcaattgtactgttgatctgttcgttgacggcgtcatcgttagcccaaccggatgccatatcgacctccccatatcaatacttgtacagttaagtgtagctaatccagggacgaactcgggcagttcaagcatcagatctcgctccattcccgcagcagattatgataaagattaagcaggctcaggatctcttcactttcgccgtagcggcttttcaggctctgaatattgttgtccagttcaaacagcatggcgcgctttttatcatcgcggatcatgctctggatccacataaaacttgccactcgtacgccgcgggttacgggtgtcacgcaatgcaggctgctggagggatacaacacgagatcgcctgccgggagttttacccgatgttgtccgaaggtgtcattaacgaccagttcgccgccgtcgtagctttgtggatcgcttaaaaacagcgtggcagaaaggtcagtacgcatccagccgttttgtggatggctgcgtactgcgccatccacatggaaaccataggtttcattgttctgatagcgattaaacagcggcgtggaaagggtacgcggcaaggccgcggcaaagaataaagcatgttggttaaccgcgttcagcacctcattttgcagggcggcgtataacgtgctgcgggtgtcgacctgttgattgttcttaacttgcgcaccttgtgcgccggtggtgacgcgtccatccacccattcggcttgttccagttgttcgcgaaaacgagcgacgtcctgtgggcttaacacgccgggaatgtggtacatcatacaatttctccaaaaagtggggcctgcgccccacatctgaatcagaaatgcatattggctgtgagcaagaaggttcttggctcgcccgggtgataacggtagccgctcttgttgatactggcgacgtaatcggtatcaaacaggttgtaaacgtttagctggaagtcgagattgcgattaactcgataccccagtttggcatcggcgacccagtaaccttcggtaaacgctggcgttcccaccgcgccgtcactacctttatgcatactgccgatatagcgtgcgcccgcgccaacagagatatcgtcggttgcctgatattggctccataaggtgaaggcgtgctccggggtatacggcaggctactggaaccatcctgggcaacatctttgccgtttttgatggttgctttttgctgggtatagccgccaatcacctgccacgcgggagtgatattcccggccacggatatctcatagccttcgacgcgtttcttaccgtattggctgtaagttccgtcatcattttgctcaacttcattttcgatatcagtgcggaacagcgcggcggtgagcaacagacgtttatccagaacctgccatttggtgccaatctcgctggtgttggctttttgcggtttaaaatcggtgcggttggcactgttaccgctgccagactgcgcaagggcgaagttgttgccgcccggaggctgctgggaaacggcatagttaatatagacattgccgttttccgtcaggtgatacagcgccccggctttccagttcatcagattgccgctcttggcggtgtcgacggtggtgaccggagaaccttttgccacaccagttgggcaggtgatggcaccgcgtccgctgccgccgcaggcggtggcactgtcatattcagtatgataattatccagacggatcccgccgttcagctcaaaatcacgggtgatttgcagcgtatcaaaggcgtaaattgcgaaggtatccgtctgaccattggcgtttgcgccgttgcgcgtcaggccgccgggatgaatgctgctgtcaggatgataaatatttaccgcgggtaacgtcaccggattaacgccgtagttagtctgcgtttcacgggtaaattccacgccggtactgacatcatgaccgatagaaccggtatagaacgtgctggtcaggttggtctggttggtgagaattttattactcacatctttggtattcgccgtgcgactccaggtccagctattcacatcgctggtgggctgagtaatattgctcgccccgcccataatcgccgtcatcaggtaatcctgctttacgcggctccaacgggtagtattgcgaatggtggtgttatcgttgatgtcgtgctcaaaacgcatggtggcggtgtcggtggtgctatcgtcgtaatcggaatccgtgccgtaaaagttatgagtatcaacttttccggaatgattcagggccgccgttcccgcagatggggcagaatagcccggcaaaccgatggtcggaatgccgccgtctggcgtgttgtgctgggtgacatgcagataattaagatacaaacgattcgctgtaccaaggccaaaagcgacagaaggggcgacgccgtaacgctcatttttgactttgtcgcgtccggcatcgtgcgttttttcgcccattacattcaggcgcaccgcggtggtatcaccaatgacctgattgacgtccagcgtgccgcggcggaaccaggcgctgccaatactggcggaggcgtcaatgccggaatcattgcgcggctgcttgctgatcatattgatgctgcctgtcggtgcgctgcgcccgtagtcggtgccggacggccctttaatcacttcgacctgctcggtattgaaggtgtcgcggctgacgctgccgatatcgcgaatgccatcaatataaatactgttagaggtatcggcaccacgcatataaatggcgtcgccagtggtggagttaccgttctcacccgcaaaaaacgcacccacgccggggacgtttttgagcgcgtcggtaaggttggttgcgccctgatctttaatcacttgttcagaaattaccgtcatcgtgcgggtagtatccgctaccggacggctgaatttcggatcggcagattgttgtggcgcataaaggctaggcgtacttgcttcgacaaccagcgtgtcatccgcgttagtttgcccttcggcggcgagtgcctgagccacaggcgtgatgccaatacaaagaccggcaaagaacgtgaggctatgaaattgtctggcagggaaattgcgattgttttccattttgcaggtgactttttcttatatgttgaaattttcactgccacgagaaagcctctctgcggatgcgatgccactgttaatcccgtgatagtgctcgtgaaagtgataataattttgataagcattatcacttggagcgattttctatcacccattgcgcgaaaaagaaatacatttatttacattgagttcatatttgatgttttttgattacaaaacagacgaaaactgcatccagaggcgaatgcagttacgttggtggggttatttgtagatggttgcagtaccgaacatctggtcatttccgcctgcggaattaatgacataacctttcgcgccttgttcgcgcgctttttctgccagtttatcctccagatcgcttaggttacttgcgccagttgcgctaacggtaccggcgggccgtagctgaccgctgtccaggttactcatcggttgcgcggcataagccgtgagagagattccgctcaggacggtggcaatcagtagtgtgaggcactttttcataatgacatcctcataaatacaacgggtagtgcctgataagtgtaggtcgcctgcgcgatgcaaatgacgcaaaaaattgacagagatgtgcttattttttgaacgatatatttttacaaaataagacaaatcaatgacatgcataatgctgatttttatgatgaattgccataaaccatagccatgttaaggttttggggaatgataaacgcagccagatatttaccctgtcgcgttatgcgggtatcttacgccgctgcttaaaggagaatgctatgtccgcccagaaaccggggttgcatccgcgcaaccgtcatcacagccgctacgatctcgccacgctttgtcaggtcaatcctgaactcaggcaattcctcacgcttacacccgccggggagcaaagcgtagactttgccaatccgctggcggtgaaggcgctcaataaggcgttgctggcccatttttacgccgtagcgaactgggatatccccgacggttttctctgcccaccagtaccgggccgggcggattatattcatcaccttgccgatttactggcagaagcaagcggaacaattccagcgaatgccagcattctggatatcggcgttggtgcgaactgtatttatccgctgattggcgtacatgaatatggctggcgttttaccggtagtgaaaccagcagccaggcgttaagcagtgcgcaggcgattatcagttctaatccggggcttaaccgcgccattcgtctgcgtcggcaaaaagagagtggggcgatttttaacggcatcatccataaaaacgagcaatacgacgcgaccttgtgtaacccgccattccacgattccgccgctgcggcacgggcaggtagtgagcgtaaacgccgtaacctggggctgaacaaagacgatgcactgaactttggcggccagcaacaggagttgtggtgtgaaggcggtgaagtcacctttatcaaaaagatgattgaagagagcaaaggcttcgcgaagcaggtgatgtggtttacaagtctggtatctcgtggtgaaaacttaccgccgttgtatcgtgccctgacggacgtgggcgcggtgaaggtggttaaaaaagagatggcccaggggcaaaagcagagtcgctttattgcctggacctttatgaacgacgagcagcgccgccgttttgtcaatcgccagcgttaaagcgttggttcccccggcggtaacggttcagccggggtcgcgcccggagcaggcagcacctgataagtctgcactggcgcgcgaacgcccgccaggtcgaaatgttttttcacctggctgtcgagggcaaagcgtaccgtccactgtttgagtggcagcgtggtgaagctaacacgcagtgtaaacgcggtattgcttaagccgacaatcccggcaaaattcggttcaccaataatcagcccgcgaatttcttcgttttccattaattccgctaccgcatctttcagtgcctgattggctttatcagcatcttcatggcgatcaacatcataatttgccaccacgctaccaatgccgcggacaaagttagcaaaggtggttatgctagaccacggaatgatgtgatacgccccggtatcctgtcgtacgcccacggagcgaatgctcatccgttccactgtgccggtcaacggcccgatagtcaccaaatctccagtgttcatgccgttttcaaactgaataaataccccggtgataatatctttcaccagcgtttggctaccaaagctgatagccagacctaatgccccggcacctgccagcaatggcgcgatattgacgccgatttcgctcaacacaatcatgatggtgatggtactgataatcaccgccagcgcgttacgaaacagcgtaagcagggtacgcgtgcgggcgctgggtagcgggcggccatgaatatcgctagccagccggttttcgatcaaactggcgagcaccgtccagccaaccgcgctgaagaaaagaatgagtgcgatacggatcaggatatctacggttttctgccccgcgccgttttgcagccagttccagaaatcgaacaatccccatgcgctcaacagcaacattaccgccacgcagactgtcagaatacgcgccgttttcagcgccgcgctcagccagccattcaaccgtttttgcagctccggatagttacgctgagtatgtgggctgagagtgatggttttcgccagccagcgggaaaacataccggaaacaaacgctgcgataccaataatcgccaggctgcgcaccgttgcacccatcataaatttcaggctgttgcccggatcgaacaagctaaagaaaaacagcacgataaaataggcgcttgccagccagtgccacaccagcgcaaaggcgcggataaacaggctgaaaaaggccaggctatgctccgcgaagttgagcaaatgctgggtaatctcttttttattacgaaagatcaggtacaacgcccagacggtcatgcacagcataatgatgacgttcgccagcgcacctatctgtacattcacctgattagagataatcggcacggccacaatcaggccataacctatcaaactgcttaaccagctcaggcgacgactccagtaacgggcgctctcgtcctgaatcgtgaacgggcgcagctccgccacgtttgggcaaaaaatcaggcgtagtacggctttgaaaaattcaatgagggcaaaggcgttgagaaacaaactttgttggaaagcgatggtgcgactgcctgcattcaggttgtcgcttaatacctggccgacaaataatgtcagggccagtaacagcaggtcgataataaacgccccgataatcatcgccggaagctgcaaccagttactgcgctcacgatttttttgccgcgcccactgacccattttgcgatacagcggcagtgcgcacaggcgaatcagccagtaaaaaccaaacactaataccgctaacatactaaaatgggtcagcgcattgctgaaggtttgtggattaaacggcttatgcggggagccggtgatattgcgataaagttgcccgaagcgggcggaaagggcttcaccataatggcggctgacttcggtgaccttttgcagcacggtttgctcttcgaccagcgtcggcggcactatttttggtaccggttcagcagggggcgtagcggcaacggtgcgcaactggtcgatcaactctttacggctggtgtcattatccagcacatccgccagtgcgccataggccgcttttttttgttcgatatccggttccggggccggttcagtcgtactgtccgttgtcgttgtggttgtaacgccgggtatggataccgcgtgggcaggtgcgcccagcaggcagaagaggatgaacaggatccaccgcatgactcctccagtgagaaaatagagcaaaaagataagtatagatgctggaggaggggcgattttaaatgagaggaatctggtgtgcctccctttcgggtgaaagggaggaagggatattaagcaggttgctgacaacgtgcgggcttttttgccggatgcggcgtgaacgccttatccgtcctacaagttcatgcaattttaataagttgccagatatcctgtaggcctgataagcgtagcgcatcaggcaatgtgtcttattaagagacgtgctgcaaaaattcctgcaagcgctggctcggcgggttcttgatcaacacctgcggattgccatcttccgcaatccggcctttgtcgataaagatcagccggctagctactttctcggcaaaaccgatttcgtgggtcacgatcaccatcgtcatcccttcttcagccagatcctgcataaccttcagcacttcatggcgcagttccgggtcaagagcggaagtcggttcatcaaacagcatcattttcggcttcaccgccagcgcgcgggcaatcgccacacgctgctgttgaccaccagaaagttcggaagggtagtgatgtgcacgttctgccagaccgactttcgccagcagctcacgtgccagtttttccgcctcttctttgttcgcgccacgcacgcgtagcgggccaaacatgacgttttccagcgctgtcagatgcgggaagaggtaaaactgctggaacaccatacctgcttcctggcgaatcaggcgctcgtcaactttcggatcgttaaccttcaggccatcgacaatcagatcgccggaggtgatttcttccagtttgttgatgcagcgcagcagggtgcttttaccggaaccggacggcccgataatcaccacgacttcgccctgggcaatgttcaaatcgatattgtgcagcacctgggttgggccaaagtgcttggagacgtttttaaattcaatcacaggattttcatccttctttccagacgacgcagaataaagctcagcaccagggtaataatcagatagaacaccgccacggcgctccagatctcaagggcgcggaagttaccggcaataatttcttgcccctgacgggtcagttccgccacgccgatcacaataaacaggctggtgtctttaatgctgatgatccactggttacccagcggcggcagcatacgacgcagtgccagcggtaaaatgacgtagcgaatggtttcccaacgactaagaccgagcgccagtcctgcttcacgaaaacctttgtggatagacagcaccgcaccacgcgtgatttccgcaatatacgcgccggagttgatcatgatggtgaccaccgccgcagtaaatgggtcgatgcgtaagtcgttaaacgccatcggcagggcgaaataaataaacatcacctggacgacgataggtgtgccgcggatcacttcaataaagaccagcgcgacgtggttggctatccaacctccgaaggtgcgtgcaaaacctgccagcaatccgattaccagaccgcctgccagaccgaggacgctaatccacagggtcattttggcaccttcaatcagaagcggaatggcaggccagatggcactccagtcaaactgcatatgttgttcctgttaccgtggtgtaaataatcaaattcagggtaattaatggccccggagcgggtttgcgcccctcaccctaatcctctccccataggggagagggaactgccagtgcgttttacaggtgtagcgttattatttcggttcagtaccgaaccattttttgtagatttcgttgtaagttccgttctcgcgcagggttttcaacgcgccgttgactttgtcacgcagctcgtcgctacctttcgggaacgcaataccgtattgctgcgcttccagagagtcacctaccgctttgaactgaccgttaccggcggttttgatgaagtacagaatgtttggcgtatcgtgcagaacggcgtctgcgcggttggtgcccagttccatataggcgttatcgatgttcgggaactgacgcagatctttagttttgatgtttgctttcgcgtaatcaacggagccagtaccgctcttcacagcaaccactttcccgtcgagatctttcacgcttttcacatcgttattgttagctttcaccatcactaacaggccgcttttgtagtagccgtcagagaaatcgatcgcttttttacgctcgtcggtgatggtaatgcccgccagcgccagatcgacgtttttggtttgcagtgccggaatgatcccactgaaatccatcggcttcagttcgtaatccagcttcagctctttagcgatggcagcccacagatcaacgtcaaagcccacatatttatcgccctgtttaaattcaaacggaacgaaggcggtatccgtcgcgacaactaattttttatccgcggcatgagaagaaaccgcaaaagccagggtcagtgcagccagactaacttttaatacagacttcatagcatttccttttttctatccacgggacgatcccctgcgtgacattcacatatatgaaaaaatcgtgccagttttgcaactccttgatttttcgagatgcggcaaaaacgtgatgcacgatttatagggcaataccctgaagatgcaccattctggggcaccaatctggtgcgctaaaattgtgcactcaacacagtgattatttagcgtaaaacctgatgaaaaaacaatctttatgtaacgattgtgtgatgatgtggatacaaaaaatttacttaatcagctggagatagcagatggatgcactaaataagtgcgttgaggtgggctgcaaaacaaaacggcctcctgtcaggaagccgcttttatcgggtactaaagttctgcaccatcagcgatggatttattcgatgttagactcgataaaccacaggaatttatccaggtcgcgagacgcggcggtcaggatatctgcggtgtcgtcatctttcgcttcgccaatcgctttgcgtacgtcattagcgacgattgcgtaacggtcagccagttctttcaggtgatcctgaacgttgtggatgtccagcgggtaacttttcagcggggttttgctgttgataacttgagtggtccccagagctacaccgcccagctgcactgcacgttctgccatggtatccagatgatcgatcagtgcggtgcggaagccatccagcatttcatgtacggcaatgaagttagcgccgcgcatgttccagtgcgcttgtttggtaatcaaagaaagatcaataaactggataacctggcgattcagcaactctactgttgcttttttctcgctgtcggagacatcgttgcgggtataaagcagattggtcgctttacttttaactaatttagcggtactcataatttcatatcctcttgatgttatgtcccagtaattaacgagattaagtatagcaccggctatgtgttccgctattctggctgttcctatcacactaatagtggtaacaagcgtgaaaaacaaaactaataaagattcaatgagttagatatattgataagaacaattcttatttatctgctcgccaggaattttcggaataaatatgcttttgcataattcgatatataaagacggtgtagaggaaaagtagcgagaaattctgcatggttatgcataaccatgcagaaatgtaaatttaattaatgtctaattcttttattttgctctctttgcgtactgtcagcgtagaccccatactagcggcgatgatagcgccgagcgccagtagctgtatgggtgtcagtgtttctccgaggaaaatcatcccggaaacggcagccagcgccggttccatgctcatcagcgtaccaaatgtccgtgttggcaaacgggtgagggcaatcatttccaggctataaggcagagcggtgctgagaatagcgacagccagacccaatggaataacgctccagtgccagagtgcttcaccagcctgaagcgctccaattggcacgaaaattaacgctgcaatcaagctaccaattgccaccgtcgcagggccatgttccgctcctgcgcgttgcccacttaaaatgtaaatagcccaacaagccccggcccccagtgccagcgcacagccggttaaatcgacatgggaaacgtcttgccccagcggtagcaggaaccacagaccaagaaccgccagcacaacccagacgaaatctaccgggcgacgagaagagaacagcgccaccgccagtggtccggtgaactccagcgccaccgcaatacccagcggtactgtctgaatagaaagataaaaaagataattcatcccacccaggctaacgccgtaaaacaacagcggtaaccgttgctctttggcaaagcgcagtcgccatggcttaaagaacgcgatgaggatcagcgttcctaatgccagacgcagcgcagtgacacccggtgcgcccaccagaggaaaaagactcttagctaagctggctccaccctgaatagacgccatggcaacgagcaatatgactattggtaaccagaccggcattttacgtaaactaccaggcatcctttctcccacaaatatctagacttaagtaaagcgtggagtgtactggatatacccaatgctggttgagcatttgttgaaaaaattttcccccgttttgactaaaatgcgccaggattgatggaatcattagtctggtgattaggaataatctggatgaatgacagggaaaacatgcgtaatacttacgcagttctctgaaaaagtgatttaaatttagatggatagcggtgtatggaaacgttctgttacatgaaatggcccgttagacatcacaaatcgcgaagagtttcccattaatttttgatatatttaaaacttaggacttatttgaatcacatttgaggtggttatgaaaaaaattgcatgtcttagtgcactggccgcagttctggctttcaccgcaggtacttccgtagctgcgacttctactgtaactggcggttacgcacagagcgacgctcagggccaaatgaacaaaatgggcggtttcaacctgaaataccgctatgaagaagacaacagcccgctgggtgtgatcggttctttcacttacaccgagaaaagccgtactgcaagctctggtgactacaacaaaaaccagtactacggcatcactgctggtccggcttaccgcattaacgactgggcaagcatctacggtgtagtgggtgtgggttatggtaaattccagaccactgaatacccgacctacaaacacgacaccagcgactacggtttctcctacggtgcgggtctgcagttcaacccgatggaaaacgttgctctggacttctcttacgagcagagccgtattcgtagcgttgacgtaggcacctggattgccggtgttggttaccgcttctaatcactttggtgatataaaaaatccgcctctcggggcggatttttgtttttaaggtttcgggtcgaaaatatcggttccgagatggttgtaatccaccttctgtaactggaagttggtgatgtatatcggcccggctttcttctcagatataaacgggtatttgatgttaatttccttcgctttaatccccgtccactgggagaaaaagcctaagaagtcattggcactgcggcgggctttaatcacacgatgcgctttatcgtcgctggaaatgaccataaaaggcacctggaaattttgctgatatttatcatcatgggcaaggtattgcacgtctttaccgcgctctttaaaggccagaccgtggtcagaaaagtaaaccaggctgaagctgctgccgctgttgcgtaactgatcgtacagcttgcgcagtaaatcgtccgtttgcgtcatggtatagagatagcagctcgtttctttgctttgcacaaaggtttcgtattttccttgtgtcctgtcgcaggcctgcggatgactgcccatcagatgtagaacaatcagctgcggttggctgtgctcttgcgccagcacttgagcggtcatatccagtaacgcttcgtctttggtgtttttatctgcttcaaaattaccttctttcaggaagtacacttcatctgctcgtttggcgatgctggcgatagcggtatcgtattcgccgatttgaccctggttggaaaaccaccaggtctggaagcccgcgcgatttgccagggtgacaaagttatcctgaaactgtggtttgccatcgacaacgcgattgagcgttaagccaaggcttttctgcgtggagccactggcggcaatgtagtcagcaaatatcaaaccgttaacgctgctggcaaacggggtattgtcccagtgaccgccaaaggcaccgagggcatcgcgacgcgcgctttcaccgatcaccaccacataggtctgatacttcggcttaacggcagtgaccgtccaggtatctttcattccggaaagttttgccatccgttcttgctcttcaatcacctcgttattattgacgatgacatccttagcaaaacgaaataccggatagccagtatctttcagtttaaatacgccaccccaggccaggttttgcacgggagcaacaaaaaatgtcgccacactgaataccagacacaggctgtcgaaggtattccagcgcgctttttcattctctttttttcgcctgattgctattacgccgagcgcaaaaataaataagccgaccaggtagctgtaccacggaaaaatcgtcaggatttcggtgctctcttccatattggtggagtgcaatgccagcaatgtattgaaattaggcgcgccgtaggcctgagcaaaagggaaataacaagccgccaccaggctactgacaccgaccagaactttttgtacgcgaggcaatgttcgccatagcaaaagcaaaatagccgtaaacgcagcggtgtagagcaaactgaaggggtaacctaagccgaggttaattaataggctctgtaaaaagtagaacgcagtccacgggctaaatacccggctacgggtaacaaggctttctttgagggttaaattcatatgccactatcgtaacaaacgccatgtgcttaccctggcgtcaagggtcaatacctgcaagagtgcgtgaagagtggaaaggggtccgcatccgcgagccgcaatatacgcagggctgcaagaagatagagcgagccgccgtagtggtcaactactgacgaacaaatcttttgcgaaggggattgcaaatccgacaaaaagtggggtttttcagaccaaaacgcgttatgcctgcatgaaagcaggagtgaagcggcgtaccgcgacgccgctatttatcggaaggtttatcttgctgcggtttgttgttgaccatatcgcacaacatagagagcagcattaaccgtactttaaagggagaatgactaaacacgcgcatacacctcttgaactcattcataagacctcctgacttgctaatcccgtcgatccttgaggggtgattgcattacatacagatatagcacaggctatattatatagctattgctaaaacgttaattttttgtaccttcgcaactctggtttacaatgtgcgcacgaaatgagaacgctatgtatgcgtcaccataatgaggaagcacaatgagtcgtcgcgcaggtacgccaacagcaaaaaaagtgacgcagttagtgaacgtggaagagcacgttgaagggttccgccaggtcagagaggcgcatcggcgcgagcttattgatgattacgttgagctgatttctgacttgatcagggaagtgggggaagctcgtcaggtggacatggctgctcgtctgggagttagccaaccgacggtggctaaaatgcttaagcggctggcaaccatggggctgattgaaatgatcccctggcgtggcgtgtttttaacggcagaaggagagaagctggcgcaggaaagccgcgagcgacatcagatagtcgaaaatttcttgttggtgttgggcgtcagtccggaaatcgcccgtcgcgacgcggaaggcatggagcaccatgttagtgaagagacgctcgacgcttttcgtttgtttacccagaaacacggtgccaaatgagcctgccttttttacgcacgctgcaaggcgatcgtttttttcagttattaattcttgttggtatcggattaagctttttcgtgccctttgcaccgaaatcctggcctgctgctatcgactggcacaccatcatcaccttaagcggcctgatgctgctgaccaaaggtgtggagttaagcggttattttgatgtgctggggcgcaaaatggtgcgccgctttgctacggagcgtcggctggcgatgtttatggtgctggcggcggcgctgctttctacctttctgaccaacgatgtcgcgctgtttattgttgttccgctgactatcacgctaaaaagactgtgtgagatcccggttaatcggctgattatttttgaggcgctggcagtcaacgctggtagcctactgacgccaattggcaacccgcaaaatattcttatctggggacgttctggtcttagctttgccggatttattgcccaaatggcaccgctggctggcgcaatgatgctgacgctcctgctcctgtgctggtgttgtttccctggaaaggcgatgcaataccatacgggggtgcaaacaccggagtggaaaccgcggctggtgtggagttgtctggggctgtatatcgtctttctgacggcgctggagttcaaacaagagctgtggggactggtgattgtggcggcaggctttgcgctgctggcacgtcgcgtggtgctcagtgtggactggacgctgctgctggtgtttatggcgatgtttatcgacgtccatttactgacccagcttccagcgttgcaaggcgtgttgggtaacgtgagtcatctatctgaacccgggttatggttaacggcaatcggtttaagccaggtgatcagtaacgtgccgagtaccatattgttgctgaactatgtgccgccgtctttattactggtatgggcggtaaacgtaggtggctttgggttattacccggaagcctggcaaatttgattgcgctacgtatggcgaacgatcgccgcatctggtggcgtttccatctctatagtataccgatgctgttgtgggcggcgttggtgggatatgttttgttagttatactcccggccaactaaggtctggcaaataaaaaaggcggattatgagtccgccttttgctttaagttttgaagattaattcagacgaaccggcatcccggagcggtttttaatcgcttcatcaagaacaacctggtcaacatctggctgaccggtcactgtctgcacgctcttcgtcagggtaattggcacaatttcctgaccttcaaactgggcttcggtggtagacagcgggttatggacttcaatataacggctgccgtctggctcggtggtcgcttttaccggctcatcaataaactgtacgcgggtaccgaccggtactttctcgaacaggaatttgatgtcttcgttacgcagacgcacacaaccatgacttacacgcaggccgataccgaagttggcgttggtgccatggatagcatacaggcgaccgatatagagtgcatacagccccatcgggttatccggacctgccggaacgacagccggaagcggttcgcccgcagcgcggtactctgcgtgcattttggcggtcggcgtccaggtcgggcctgcttttttacgctcaactttggtggtccagttgataggcgtatctttgcctaactgaccaatgccgatcggcagcacgataacggtgttggtccctttcggatagtaataaagacgcatctcagcactgttaatgacgatgccttcatgaacggtatccggcaggatcagctgctgcggaatgttcagtacagtaccgcctttcggcaggaaggtatccacacccgggttcgcttccatcatattggaaagccccatctggtactcggcggcaaaatactccagcggctgagtgttaccttcaggaatggtgatcacctgattctgaccaaccaggcgactcccgtcggttggcagaggataagttaccgcagaggcggtactgcaaaagccgacaacagcgaaggccgctgcgaataatgttttcaatttcatattcatgttaagcgagattttgtgcctggcaggccattgggttgagaatattagagtattggaagcgcattataagttcattccagctcacagtgaaatcagatgtgtacgaaatcacattttttgcctttggcttgagtgtagaccttaagcgaggagcaggatcttctttcagacttatggcataatgcgcggtttgtcatatctcttttcaggatacgcctgtgttagtttccagtaacgtcaccatgcagttcggcagtaagccgttgtttgaaaacatttccgtcaaatttggcggcggcaaccgttacggcctgattggcgcgaacggtagtggtaaatccacctttatgaagatcctcggcggcgaccttgagccgacgctgggtaacgtttccctcgatcccaacgagcgcattggtaaactgcgtcaggatcagtttgcctttgaagagttcactgtgctggatacggtgatcatggggcataaagagttgtgggaagtgaagcaggagcgcgaccgcatctatgctttgccggaaatgagtgaagaagacggctataaagtggccgatctggaagttaaatacggcgaaatggacggttactctgcggaagctcgcgccggtgaactgttgcttggcgtgggaattccagtggaacagcactacggcccgatgagtgaagttgctcctggctggaagctgcgtgtgcttctggcgcaggcgctgtttgctgatccggatattctcctgctcgacgaaccgaccaacaacctcgacatcgacaccattcgctggctggaacaggtgctgaacgagcgtgacagcaccatgatcatcatcagccacgaccgtcacttccttaacatggtctgtacccacatggcggatctggattacggcgagctgcgcgtttatccgggtaactacgatgagtacatgacggcggcgacccaggcgcgtgaacgtctgctggccgataacgccaagaagaaagcgcagattgctgagttgcaatctttcgttagccgctttagcgccaacgccagcaaatctcgccaggcaactagccgcgcgcgccagattgataaaatcaaactggaagaggtgaaagcctccagccgtcagaacccgttcatccgttttgaacaggataagaaactgttccgtaacgcgctggaagtggaaggtctgaccaaagggtttgataacggtccgctgtttaaaaatctcaacctgctgctggaagtgggtgaaaaactggcggtactgggtaccaacggcgtcggtaaaagtacgctgctgaaaacgctggtgggcgatctgcaaccggacagcggcaccgtaaaatggtctgagaacgcgcgcattggttactatgctcaggaccacgaatatgagtttgaaaatgatctgaccgtgttcgaatggatgagccagtggaagcaggaaggcgatgacgagcaggcggtacgcagtattctcggtcgtttgctgttcagccaggacgacatcaaaaagccagctaaagtgctttccggtggggaaaaagggcggatgctgtttggtaagttaatgatgcagaagccgaacattctgatcatggacgaaccgaccaaccacctggatatggaatccattgagagcctgaacatggcactggaactgtatcagggcacgctgatctttgttagtcacgaccgtgagttcgtaagctccctggcgacccgcattctggaaatcaccccggaacgcgtgatcgactttagcggtaattacgaagattacctgcgtagtaaagggatcgagtaagtgattatccgtcaccccgatactgtcggggtgacggcggctgatgacaaatgcaaaatagcctgatgcgctacgcttatcaggcctacgcagtacctgcaatatattgaatctgcaggactttgtaggccggataaggcgttaacgccgcatcaggcattaacaaagcgcatttgtcagcaatctgagtaacgtcgaatcgattttcttaatcccacatcaattcacttccattaattctcaaacatccatgcccaacgctcgcttaccgtgaatgttgaggtcggcaagcgtaaagcgtccttcccagtttgtttcatagtcctcgcgcgggaagtcgcccgggcttgcgcctttttccagtgcggccttcaccttgtgcgcgtaggcaagatttttctcgcacatcggtgccgcaggaatgtacatcacgttgccccaaccttgttgattttcaacgggggcaacggaatggatgacgtcgcagtgccaccagacggagtctccggcttcgagttttggaatgctggttaacgcctcaatcaacagtggatgccattgctcacttaccggcaatactcttccgggcgctacgccgcacagttcatcctccggcacatcatcaagcagcggacgtaacagtacgtacgccatagcttcaggaatgggcacgacgtgcagcagcccctgaccaggcagcatatcagagagcgctgtccagccctggaatgtccgaaacacggaacatttggtggtgttgtccaccgtgtactcttcaacttccgtacgatgtgccgcatgccagggatcatattgcgccagattgccattaaagacgttggcgaaaacgcgctgatacgctggaagcagccagcgttccagtgccccggagtcggtatgcgctccaagacctttggaggtcgttccgggcggacggcggcggatacggtcagggtagatgacgctcacatccgggttaaaccattgctttccatcactttcaaatgtccacagacgattgagaaagctctgcgcattcgccatttcttcactctggcgggcctgcatttgcgcctggctccagtagatggggtaaatctcgggacgactagcgctgagcgtcccgaagaaattatcgccggggcctttgtagacctcgtcaaagcggttgcggtccagatagtccagcatgctctgatcccagcctagcgcttgttcgcgggggaaatggccttttatcaccgcacaaccgcgacgtttaatctgttcgcgctgctctgcagtaacatgacctgctttgatatcggcataagacagcaccggccagacggcatcgccctgtgctttgagtgcgttgatttcagccactcgcgtggcaatgtcatcgcttagctgattaaagatctgctggacgtcgccaagctgcgcccgcagcgcgtgcttcatctgacggatagctgctttgtgatcggcaggcaatgtgtcgctggtaaaagtagaagccataaccacctctcattaactttcattcgaaaccattctgatttgcatgtgacaatataagttataaataagttaatgcaagtttaatgatttgatgtgatgtacaggatgtaaaaagaagggaaaaccggagcgcacggctccggtagagaggtcagctgttaaaaggggatgtgttatccagcaccgcctgaatcacattcagcgcgccttcatgattattatcatcggtagcgtaacgggcgatttgtttaatgttttccgcagcattgcccatcgcaaaggaataacgcgccattttcagcatctccgcatcgttaccgctgtcgccaatcgctaccacattttgcggactcagatcccagcgtttcagtaaccggctaataccgtttgctttatgtagaccgggaataatcaggtcgataaagccaaaaccactggtaacgggtttcataatgccatcgagcgctacgtgcagtttgtcgatcactaacgggatttgttcatccggcaggttgaggctaaacttgaacagtacgtcgtcaatctcctgataatcttttacaggtttcaggcgatggtagtgttttgccatcagtgcgacaaatgcttcgggggcattttcgctgacatatgcactttgcagaccgcaggcgacaaaattgagttgcttatcttttagcaactcgccaataacaatccggctttcatgtcgggtcagttcgccgtggaacaactgcttgccatgttcgtaaaccagtgcgccgttttccgcgacaaaagagatctcatcctttagctcaggaaagaaactaataagctggtaatactgattaccgctggcaacaacgaacttaatgccgcgctttttcagttcctgatattgcgccataaaacgtggttggttgtacgttttggcgtcgttaagaaaagtaccgtccatgtctgtgacgataacttttacgctcataggtgtgctcctggctcgaaaatgaaaccgtaacagtgtaataacaatgtgacgcagagcacaaattatatttcgaatgaaagtaaggatgaaattgatgatgtgaatgatttagcccggcgacgacgccgccgggccgaggagattacagcatatgttcagtacgggcgatgatatcgtcctgagcgtctggagagagcgcggtgaagaacgcggaatagcccgcgacacgcactaccagatcgcgatactgatcgggatgttttttcgcatccagcagcgtttcgcgggaaacgatgttgtactgaatatgccagcctttatgcacttcaaagaaggtacgcagcaggatcatcagtttctgcttgtcagattcgttctccagcgttgccggattcagtttctggttgagcaacacgccgccgagaatcgctgccgtaggcagtttacccacactgccaatgaccgcagtagggccaagatggtcagtaccggaggccgggcttgcgccttctgccagcggggtgtgggctttacgcccgtccggtgttgccatagtctgcgcgccaaacggtacgttagcggagatactactcgtacccgcgtaatagttgccgccaaccggaccacgaccgtagcgcggattatggtactgtttcagttcgtcgatataggtctgataagcgcgagccagcagcgtatcgacagtatcatcgtcgttgccgtacttcggcgcaccgttaatcagccgctgacgcagctgctcgtgagtcaggccgtcgaagtcatctgccagtgcggcagcaagctgttgctgaccaatcgcaccttgttcaaacaccagtttcttcactgccgccaggctgttgccgaggttggcaatgccgacctgcaggccagaaacccagtcatatttcgcgccgccttgcttgatacttttcgctcgctcaatacagtcatccaccagcgcgctgcagagaatatcgtgcacgttctcttccagcatggtgtcgacgacatattcgatttcgatacttttgcgggtgtagtaacggatttgcgtatcccacgcgtccatcacttcatcgaagttgttgaagttacctgcgctcaacgctttttcttgtggcaggaacactttgccgctggtggcatcatgcccgccttccagcgccgccagcatcacgcgggcgaagttgataaagctcatgccggtacagcgatagccccatttgccaccgacggcggtttctatacaaccaatcgctgcgtagtcataagcgtcctgcggttcaataccgagtttaataaattccgggatcacgatttcgtcgttgttgaacgccggcatcccgaagccgcaacggatcacctgtacgcaggcgtcgaggaaatcgttgctcattcctgcatggtaacgcacgctgaggttaggctgagtggaacgcaggcgaccgcaggattcgaggatcgcgtaagagagtggattcaccgcgtccattggttgaccatcaaccagattttgcccgccaatagtgacgttctgatacagcggacttcccgcagaggctttactgtgactgccggagcggatcttgttcacttccagcagtttcagccagcagctatgcagcatctcgatggcgtgttcgcgatccagcgtctggttgagttcaacgtcgcggcgatagtacgggtagagatactggtccatacgaccaaagcttacactgtgaccgttagattcgatctgcaaaatcaactggatgaagtaacacagttgcagcgcctgccagaaagtctgcggcggctggtgggcgataagatcgcagttttctgccatcgccagcagttcatcgcgacggctttcgcgggtttcggtcgcggccatttcacgcgccagggcagcgaaacgttcaatgtgttcactgactgccaccagcacgatatcaatcgctttcaggaattgctcaccgtgtaaatcttccagcaccgtcaggttgatgcggctgcgacgttccgctacttcctcgcgcagaccatcaagccctttttccagcagcagcgggaaattcaccgccaggtgcgcatcgccggaggtcatattgccttccgctttaatgattccggtcgccagcagacctttttgctcatcggtaaacatgccgtagcagcgatcctgtacggtctgaccgcgccaccacgggcacacttcatgcagaacgcgtttgttctcttcgctcaccgcaaagccagcaccgggacgatctgccagatcatcaatctctttttcgatccagctgacagtatattccgggaagatcggcgcggcgcgaacttcgcttgcctggttgccaatgatcaactcatcgtgtttgatccagatggtgcgattcgccaggtgatgcgccagtgccagcgcgcgacgtaccgggatcggcttatcgagatgttgttgatacatctcggtatagtgctgcgcgcgctcggtacagactggcggtttcacaatatgcaccagcgcatttttgtgcgctttaatgcggtcgctgagcgtgtccagtttcagtgtggtcatggttgttatcctcgtaaggtcgcggttaaccctttctggcaggcatactgctgggcaaagtcgagcagttctggcgcatcaagcggtttttccggggcgtcatagggcagattaagtaagtgatatttgttgatgcccagcgtgtggtagggcagaaaatgaatttcgccaacgtgcagctcgtcggcggcaaaatcggtaatggcttttacagaggtttcgtcggcattaaagccctgaatcagcggcacgcggataatgatttttttgcccgctgcggcgagttttttcaggttatccagcactctggcggcgttaccgtcggtccactgtttaaacggcgcgtcggcaacgtgttttaaatcggcaagaaacagatcgatatagggcagagaaggggcgatatatttccacggcacatgcagacaggtttctaccgcagtatgaatgcctgcctcgtggctggcttgcagtagcgccatcgccatttccggctgcataaagggctcaccaccgctaagcgttaaaccgccgccgctgcgatcgtaaaacggtttatcgcgcagaacggtcgtcatgatctcctcaacgcttttcacttcaccacacacggttaatgcctgtgtcggacagcagtcggttaacgccgtcagatgctccggggttaacttttcccgatgaataagcaaaccattcagcgcgcgctcaatcacttccggcgcggccttagcgcacagctcgcagccttccagacacagtcgtgcgtcatacagcagatcctgcgtgcgggcgcggctttccgggttctgacaccagcggcagcccaggctacagcctttaagaaatacgaccgtgcggataccggggccatcatgggtgctgtagcgctgaatattgaaaatcatagttgcctctctatttcgttcaagcattaaaatactttcgaatgaaagttagattgatgtgcgtcaactgttcagagagttttcccgtgatagtctacattcagacaaaaagtacattttgaggatggttatggaactgtatctggatactagtgacgttgttgcggtgaaggcgctgagtcgtatttttccgctggcgggtgtgaccactaacccaagcattatcgccgcgggtaaaaaaccgctggatgttgtgcttccgcaacttcatgaagcgatgggcggtcaggggcgtctgtttgcccaggtaatggctaccactgccgaagggatggttaatgacgcgcttaagctgcgttctattattgcggatatcgtggtgaaagttccggtgaccgccgaggggctggcagctattaagatgttaaaagcggaagggattccgacgctgggaaccgcggtatatggcgcagcacaagggctgctgagcgcgctggcaggtgcggaatatgttgcgccttacgttaatcgtattgatgctcagggcggtagcggcattcagactgtgaccgacttacaccagttattgaaaatgcatgcgccgcaggcgaaagtgctggcagcgagtttcaaaaccccgcgtcaggcgctggactgcttactggcaggatgtgaaagtattactctgccactggatgtggcacaacagatgattagctatccggcggttgatgccgctgtggcgaagtttgagcaggactggcagggagcgtttggcagaacgagcatttaaccggacgttctgcatcctcataaattgctgatgacgtggcggagtgccgcgtcttatcaggcctggaggtggcaattactgcccacacacctcacaccccggattacgcatcagtttcatttcgcgaaactgacaggtcatcgcatcgtacatgacgattttcccgctggccggtttgccataacctgccagcattttgatcgcttccattgcctgcaagctaccaattacgccgatcaacggtgccattacgcctgcttccacgcaggttaatgcattttcaccaaacaaacggctaaggcagcgatagcacggttcaccgtcctgataagtaaagacggtgatttgaccttccatacgaattgccgcgccggaaaccagcggtaccttcgcggcaaaacagcctgcgttcagttgattacgtaccgcaacgttatccgtacagtcgagcaccagatcgtgttcagcaatcaatgctgcaagttctgcgtcatccagcagtgcattgactggcgtaatcgcgatatgtgggttgatccgcgtcagggcgtcacgggcggattccaccttcggttgcccgaccgtggcatcactgtgcagtgtctggcgttgcagattgctgaggctaaccgtgtcgaagtcgagcagcgtcaggttaccgacaccggcgcttgccagatactggctggctgcacagccgaggccgcccaggcccactatcagcacgcgagaatctttcagcgcctcctggccgtcaaaatcaaagccgcgcagaatgatttgccggttgtagcgcagcatctcctgatcgctgagttccgccattacaggcctccgaacaacgcgttaaacggttctacttccacccattcgcccacttccacattgccgcgatcgcgttccagcacgataaagcagttgccgaggctaaaggagctaaatatatgactaccctgatgtccggtggtcgtcacttccagttcgccatcggcgttgcgttgcagcacgccgcgctggaaatcaagacgtcctggcgtttttttcaggcgggacgctgtgcgtacgcgctggcgcgcgggcaggccgctggcggtgttaccgcttagttttgccagcaaaggctgtaccagttgatagaaggtcagcgtcgcactaaccgggttgcccggcaggccgcagaaccagctattgctgagtttaccgaacgcgaacggtttacctggtttaatcgccagcttccagaaggcgatctcccccagctcttcaagaatcgttttggtgtaatccgcctcacccacactaacaccgccggaactgatcaccacatccgcctggctgtcggcttcaataaatgcggcgcgcagggcatggggatcgtcgcggataatccctaagttaattacctcgcatcccaactgttctaacatcaggtgtacggcgagacggttggtatcgtagatttggccgtcgcccagcggctgaccgggcaactggagttcatcaccggtagaaaaaagcgctacacgcactttacgaatcaccggaacttcggcaatccccagactagcaattactggcagctctgcggtagtcaggcgagttcccgccgggaaaacaaccgcacctgcagagatatcttcaccgcgacggcgaatattttgcccgctacgcacttcagcagtaaaacgcacgccattgtccatttgttcagtctgctcctgcatcaccaccgcttcgcagccttccggcaccggcgcaccggtcataatacgaatgcaggtacccgcaggccattcaccatggtatggctgaccggcaaaggatttaccggcaacgggcagcggttgcccggaggcaatatcggctaaacgcaccgcgtagccgtccattgcggagttatcaaaccccggaacatcaagcgggctaacgacatcgctcgccagaatacgaccaaaacactgtaccagtggcagcgtttcctgggcggtcagtggggtgacgcgagaaagcatctcattaagcgcggtgtcgaggctcatcaatccggtggtaaattccatgaaaacactcctgcggaggcaaaatcgaatttgcctattatgtcagaaaaacgccacagactgtatgccacctcgggcgtagcgctgggtcctgcctttacatgccatatccatctttctatattcaaaaattgaatgagtaattcataaaaattctgatatttatagcaaaagtggcgaaccacccttaatggacgaatactatgggcaaagcagtcattgcaattcatggtggcgcaggtgcaattagccgcgcgcagatgagtctgcaacaggaattacgctacatcgaggcgttgtctgccattgttgaaaccgggcagaaaatgctggaagcgggcgaaagtgcgctggatgtggtgacggaagcggtgcgtctgctggaagagtgtccactgtttaacgccggaattggcgctgtctttacgcgtgatgaaacccatgaactggacgcctgtgtgatggatggtaacaccctgaaagccggtgcggtggcgggcgttagtcatctgcgtaatccggttcttgccgcccggctggtgatggagcaaagcccgcatgtgatgatgattggcgaaggggcagaaaattttgcgtttgctcgtggcatggagcgcgtcagcccggagattttctccacgtctttgcgttatgaacaactactggcagcgcgcaaggaaggggcaaccgtcctcgaccatagcggtgcgccactggatgaaaaacagaaaatgggcaccgtgggggccgtggcgttggatttagacggcaatttggcggcagccacgtccacaggcggaatgaccaataaattacccggacgagttggcgatagtcccttagtgggtgccggatgctacgccaataacgccagtgtggcggtttcttgtaccggcacgggcgaagtcttcatccgcgcgctggcggcatatgacatcgccgcgttaatggattacggcggattaagtctcgcggaagcctgcgagcgggtagtaatggaaaaactccctgcgcttggcggtagcggtggcttaatcgctatcgaccatgaagggaatgtcgcgctaccgtttaacaccgaaggaatgtatcgcgcctggggctacgcaggcgatacgccaaccaccggtatctaccgtgaaaaaggggacaccgttgccacacagtgatgaacttgatgccggtaatgtgctggcggttgaaaatctgaatattgcctttatgcaggaccagcagaaaatagctgcggtccgcaatctctcttttagtctgcaacgcggtgagacgctggcaattgttggcgaatccggctccggtaagagtgtgactgcgttggcattgatgcgcctgttggaacaggcgggcggtttagtacagtgcgataaaatgctgttgcagcggcgcagtcgcgaagtgattgaacttagcgagcagaacgctgcacaaatgcgccatgttcgcggtgcggatatggcgatgatatttcaggagccgatgacaagcctgaacccggtatttactgtgggtgaacagattgccgaaagtattcgtctgcatcagaacgccagtcgtgaagaagcgatggtcgaggcgaagcggatgctggatcaggtacgcattcctgaggcacaaaccattcttagtcgttatccgcatcaactctctggcgggatgcgccagcgagtgatgattgcgatggcgctgagttgccgcccggcggtgctgattgccgatgagccaaccaccgcgctggatgtcactattcaggcgcagatcctgcaattaatcaaagtattgcaaaaagagatgagcatgggcgttatctttatcactcacgatatgggcgtggtggcagagattgccgatcgggtactggtgatgtatcagggcgaggcggtggaaacgggtaccgtcgaacagatttttcatgcaccgcaacatccttacacccgtgcgctgttagctgctgttccgcaacttggtgcgatgaaagggttagattatccccgacgtttcccgttgataagccttgaacatccagcgaaacaggccccccccatcgagcagaaaacggtggtggatggcgaacctgttttacgagtgcgtaatcttgtcacccgtttccctttgcgcagcggtttgttgaatcgcgtaacgcgggaagtgcatgccgttgagaaagtcagttttgatctctggcctggcgaaacgctaagcctggtgggcgagtctggcagcggtaaatccactaccgggcgggcgttgctgcgcctggtcgaaagccagggcggcgaaattatctttaacggtcagcgaatcgataccttgagtcccggcaaacttcaggcattacgccgggatattcagtttatttttcaggacccttacgctagcctggacccacgtcagaccatcggtgatagcattatcgaaccgctgcgtgtacacggtttattgccaggtaaagacgcggctgcacgcgttgcgtggttgctggagcgcgtgggcctgttacctgaacatgcctggcgttacccgcatgagttttccggcggtcagcgccagcgcatctgcattgctcgcgcgttggcattgaatccaaaagtgatcattgccgacgaagccgttagcgcgctggatgtttctattcgcgggcagattatcaacttgttgctcgatctccagcgtgatttcggcattgcgtatctgtttatctcccacgatatggcggtggtagagcggattagtcatcgtgtggcggtgatgtatctcgggcaaattgttgaaattggtccacggcgcgcggtcttcgaaaacccgcagcatccttatacgcgtaaattactggcggcagttccggtcgctgaaccgtcccgacaacgaccgcagcgtgtactgctgagcgacgatcttcccagcaatattcatctgcgtggcgaagaggtggcagccgtcagcttgcaatgcgtcgggccggggcattacgtcgcacaaccacaaagtgaatacgcattcatgcgtagataacattcaggcggagaataaaatggcaagagctgtacaccgtagtgggttagtggcgctgggcattgcgacagcgttgatggcatcttgtgcattcgctgccaaagatgtggtggtggcggtaggaagcaatttcaccacgctcgatccgtatgacgcaaatgacacgttatctcaggccgtagcgaaaagcttttaccaggggctgttcggtctggataaagagatgaaactgaaaaacgtgctggcggagagttataccgtttccgatgacggcattacttacaccgtgaaattgcgggaaggcattaaattccaggatggcaccgatttcaacgccgcggcggtgaaagcgaatctggaccgggccagcgatccggcgaatcatcttaaacgctataacctgtataagaatattgctaaaacggaagcgatcgatccgacaacggtaaagattaccctcaaacagccgttcagtgcgtttattaatattcttgcccatccggcgaccgcgatgattagtccggcagcgctggaaaaatatggcaaggagattggtttttatccggtgggaaccggaccgtatgaactggatacctggaatcagaccgattttgtgaaggtgaaaaaattcgcgggttactggcagccaggattgcccaaactggacagcataacctggcgtccggtggcggataacaacacccgcgcggcaatgctgcaaaccggtgaagcgcagtttgctttccccattccttacgagcaggccacactgctggagaaaaacaaaaatatcgagttgatggccagtccgagtattatgcagcgttatatcagtatgaacgtgacgcaaaagccgttcgataacccgaaggtccgtgaggcgctgaattacgccattaaccgtccggcgctggtgaaagttgcctttgcgggctatgcaacgccagctactggtgtggtaccgccaagtatcgcctacgcgcaaagttataaaccgtggccttacgatccagtgaaagcgcgcgaattactgaaagaggcgggatatcccaacggtttcagtaccacgctgtggagcagtcataaccacagcaccgcgcagaaagtgctgcaatttacccagcagcagttagcgcaggtcgggattaaagcccaggtgactgcgatggatgccggacagcgggcggcagaagttgaaggtaaagggcaaaaagagagcggcgtgcggatgttctacactggctggagcgctagtaccggcgaagcggactgggcactaagcccgctgtttgccagccagaactggccaccgacgctgtttaataccgcgttttacagcaataaacaggtggatgacttcctggctcaggcactgaaaactaatgatccggcggaaaagacccgcttatataaggcggcgcaggatatcatctggcaagaaagcccgtggatcccgctggtggtagaaaaactggtgagcgcacacagtaaaaacctgaccggtttttggatcatgccagacaccggcttcagctttgaagacgcggatttgcaataagcaacgcagggagtggaatgcttaattacgttatcaaacgcttactggggttgattccgacgctgtttatcgtcagcgtgctggtgtttttatttgtccatatgctgcccggcgatccggcgcgattgattgccgggcccgaagctgatgcgcaggttatagaactggtgcgtcagcagctggggttggatcagccgctgtatcaccagttctggcactatatcagcaatgctgtgcagggggattttggcctgagcatggtgagccgtcgtccggttgccgatgagattgccagccgctttatgccaacgctgtggctgaccataaccagtatggtctgggcggttatatttggtatggcggcgggaattatcgccgccgtctggcgtaaccgttggccggatcgattgagtatgaccattgcggtgagcgggatcagctttccggcatttgctctggggatgcttttaattcaggtattctccgttgaactgggctggctgcctaccgtgggagcagacagttggcagcactacattttaccctccctgacgctcggcgcggcagtggccgccgtgatggcgcgctttacccgcgcgagctttgtcgatgttttaagcgaagattatatgcgtaccgcgagggcgaaaggggtgagcgaaacctgggttgtcctcaaacacgggctacgtaacgcgatgatcccggtagtgaccatgatgggcttacagtttggctttttgctcggtggttccatcgttgtggagaaagttttcaactggccgggacttggacgcttactcgttgactccgtagaaatgcgtgattacccggtgattcaggcggaaattctgcttttcagcctggaatttattcttatcaacttagtggtggatgtgctttacgccgccattaacccggctatcaggtacaagtaaggatgcgactatttaactggcgacgtcaggcggtgttaaacgccatgccactggtcaaacctgaccaggtacgtacaccgtggcatgaattctggcgacgatttcgccgtcagcatatggcgatgaccgccgcattattcgttattttattgattgtggtggccatttttgcacgctggatcgctccctatgacgccgaaaattattttgattatgacaatctgaataacggaccttctttgcagcactggtttggcgtcgatagtctggggcgtgacattttcagccgtgtcctggttggtgcgcaaatcagcctggcggcgggcgtgtttgccgtgtttatcggtgcggcgatcgggacgttgctgggcttgctcgctggatattatgaaggctggtgggatcggctgatcatgcgcatttgcgatgtgctgtttgccttcccgggtattttactggcgatcgctgttgttgcggtgttgggaagcggcattgctaacgtgattattgcagtcgccattttttccatccccgcgtttgcccgcctggtgcgcggcaacacgctggtgttgaaacagcaaacctttattgagagtgcacgcagtattggtgccagcgatatgaccgttttgttgcgtcatatcctgcctgggaccgtctcttctatcgtggtgtttttcaccatgcgcattggtaccagcattatctctgccgccagcctcagttttctcggcctcggtgcgcagccgccgacaccagagtggggagcaatgctcaatgaggctcgagcggatatggttatcgcgccgcatgtcgctgtttttccggccctggctatttttctgaccgtactggcgttcaatttgttgggcgatggtttacgcgatgcgctggatccgaaaattaaaggataattacgtttgaatattgcttgaaagggtaatcacctcacaggaaattattgccctaagcaagtgttgtaactttctgctgattttgtagaatcgggtaatttggttaaaaagccgcagcaagggacaatttttgcagcggcacagcgttcagatagttattttgttaaatgtattaacatgctgagtttatacgaaaagataaagataaggctgataattttatttttattggcagcactgagttttattggtctttttttcatcattaactatcaactggtaagcgagcgcgcggtaaaacgtgccgatagccgctttgaacttattcagaaaaacgttggctatttctttaaagatattgaacgtagcgccctgacattaaaggacagtctgtatttattaaaaaatacagaggagattcaacgcgccgtgattcttaaaatggaaatgatgccatttttagacagcgtgggactggtacttgatgataataaatattatctttttagccggagggcgaatgataaaatcgttgtttatcatcaggaacaagtaaatggaccgcttgtcgacgagagtgggcgggttatttttgccgattttaacccaagcaaacgaccgtggagcgtggctagtgatgactctaacaacagctggaatccggcatacaattgctttgatcgtccgggtaaaaaatgtatctcttttacgctacacatcaacggcaaagatcacgatttgttagcggtggataaaattcatgtcgatttaaactggcgatatctgaacgagtatcttgatcaaatcagcgctaatgatgaagttctatttttgaaacaaggccatgagatcattgccaagaatcaactcgctcgtgaaaaactgattatttataatagcgaaggtaattataatattattgattctgtcgatactgaatatatcgaaaaaacaagtgcggtgccaaacaacgcattattcgaaatctatttttattatcctggcggtaatttattgaacgcaagtgataaacttttttatctgccgtttgcgttcattattatcgtattgctggtggtttatttaatgaccactcgtgtgttccgtcggcaattttctgaaatgacagagctggttaatacgctggcgtttttgcctgacagtacggatcaaatcgaggctctgaaaattcgtgaaggcgatgcgaaagagattatcagcatcaaaaatagcatcgcggaaatgaaagatgccgaaattgaacggagtaataaattgctcagtctgatctcttacgatcaggaaagtggttttattaaaaatatggcgattattgagtctaacaataatcagtatctggctgtggggatcatcaaactgtgtggtctggaagccgtggaagcggtgtttggtgttgatgagcgcaataaaatcgtcaggaaattgtgtcagcgaattgccgagaaatatgcgcaatgctgcgatatcgtgacattcaatgccgatctctatttacttctgtgtcgggaaaatgtacagacatttacccgtaaaatagcgatggtaaacgattttgacagcagctttggctaccgcaatctgcgcatccataagtctgccatttgtgaacctttgcagggggaaaacgcctggagttacgcagaaaaactgaaactggcgatttccagtatccgtgaccatatgttcagtgagtttattttctgtgatgacgcgaaactcaacgaaatagaagagaatatctggattgcgcgtaatattcgccatgcaatggaaattggcgaactattcctcgtctatcaaccgatcgttgatattaacacccgcgccattctgggcgcggaggcgttgtgccgttgggtgtctgcggagcgggggatcattagtccgctgaagttcattaccattgctgaagatatcgggtttatcaatgagctgggttatcagattattaaaacggcaatgggtgaattcagacattttagtcagcgtgcgagcctgaaggatgatttcttactgcatattaatgttagcccctggcagttaaacgaaccacactttcatgagcgttttaccaccatcatgaaagaaaatggcctgaaggcgaacagcctctgtgttgagatcactgaaaccgtgatcgagcgaattaatgaacatttttatctcaatattgaacaactgcgtaaacaaggggtacggataagcattgatgactttggcaccggtttgagtaacctgaaacgtttttatgaaattaatccagacagcataaaggtggacagccaattcaccggcgatattttcggtactgcgggaaaaattgtgcgcattattttcgacctggcacgctataaccggatcccggtgattgcggaaggcgtagagagcgaagacgttgcgcgcgaattaatcaaattaggatgtgttcaggctcaggggtatctgtaccagaaacccatgccattctccgcctgggataaaagtggaaaattagtaaaagagtaatttacgtatgtccagaatcaataagttcgtacttacagtcagtctgctgatttttatcatgattagtgcagttgcctgcgggatctacactcaaatggtaaaggaacgggtgtatagcctgaaacagtccgttattgatactgcttttgcggtggcaaatattgctgaatatcggcgtagcgtggcaattgatcttatcaacacgctaaatcccacggaggaacagctgttggttggtttgcgcacagcttacgccgacagcgtttccccctcttatttgtacgatgtcggtccttatctgatttccagtgacgaatgtattcaggtaaaggagttcgagaaaaattattgtgcagatattatgcaggttgtgaagtatcgacatgtcaaaaatacagggtttatctcttttgacggtaaaaccttcgtctattacctctatccggtaactcacaatcgtagtctgatatttttgcttggtctggagcgtttttctttactgagtaaaagcctggcgatggacagcgagaacctgatgttctctctatttaagaacggtaaaccggtgaccggtgatgaatataatgctaaaaacgccatcttcaccgttagcgaagcgatggagcacttcgcctatttgccgaccggattgtatgtatttgcgtataaaaaagatgtttatttgcgggtttgtacattgattattttctttgccgcattggtggcagtgataagcggtgccagttgcctctatctggtacgcagagtgattaatcgtggtattgtggagaaagaagccatcattaataaccattttgaacgcgtactggatggcgggcttttctttagcgctgccgatgtcaaaaaactctacagtatgtataacagcgcgttcctggacgacctgaccaaagcaatgggcagaaaatcctttgacgaagatttaaaagcgctgccggaaaaaggcggttatttgtgcctgtttgacgtcgataaattcaaaaacattaacgacaccttcggtcatttgctgggcgatgaagtgttgatgaaagtggtgaaaatccttaaaagtcagatcccggtagataaaggtaaagtctaccgcttcggcggtgacgaatttgcggtgatttatacgggtggaacgctggaagagttgctaagcattctaaaagaaatcgttcatttccaggtgggaagcattaatttaagtaccagtatcggtgtagcacatagtaatgaatgtcctaccgtcgaacgcttgaaaatgctggcggatgagcggctgtataagagtaagaaaaacggcagggcacagattagctggcagtaatcattattcgcaggccggacaaatgattttgcccggcctgaattaattaaacccggctaccccacaaatcgtactcatcggcgtgctcgactttcacacgcaggatatcacccggcttaacgttggtttcaccattgagataaaccgcgccgtcgatttccggtgcatctgccatgctgcgaccaatcgcgccttcttcgtccacttcgtcgataatcaccagaatttcacggcccactttctcttgcaggcgctcggcggaaatctgctgctgcagctgcatgaaacggttccagcgttcttctttaacttcttccggaacctggtcaggcagggcattggcgtctgcaccttcaaccgggctgtatttaaagcagccaacgcgatccagacgcgcttctttcaggaagtcgagtagcatctggaaatcttcttctgtctcgccagggaagccgacaataaaggtactgcgtagggtcagttccgggcagatttcgcgccactgtttgatgcgcgccagttggcgatctacagaacccggacgcttcatcagtttgagaatgcgcgggctggcgtgctgcaacggaatgtccagatacggcaggattttgccttctgccatcagtgggatgacgtcgtccacatgcggataagggtaaacgtagtgcagacgtgtccagatccccagtttgcttaactgttcgcacaggctgaccatgctggtttttaccggctcgccgttgtggaagccagtacgatgtttaacatcaacgccataggcggaagtatcctggctgatcaccagaatctctttaacgcccgcatctaccagacgtttcgcttcacttaacacttcgccaatcggacggctcaccaggtcgccgcgcatagacggaataatgcagaaggtgcagcggtgattacagccttcagaaattttcagataggcataatgacgcggcgtcagtttcacaccttgttctggcaccaggctcaggaatgggttgtgtttcggttttggcacgtagtgatgaacgtgctccagaacctgctcatagctatgaggcccggtgatttccagcactttcgggtggacttcgcggatctgatcttcttttgcccccagacaaccggtcacaataaccttgccgttttcattcaacgcttcaccaatggcttccagactttcttgtaccgcgctgtcaataaagccgcaggtgttgacgatcaccatgtccgcatcgtcatagctcggtaccacgtcataaccttcagtgcggagttcggtgagaatacgctcactatcaacaaggtttttcggacagccaagggaaacaaagccgattttcggctggggagttactttgctcatagcttaaaaaatattcagttacaggaaaggtcagggcagggattctacagagttctggataaaatttgtatcgcaatctcattcgctggcggaggcgaaggaaatgtaaattttgttaattcggcgtgaagaattgatcctggacagcattttgctcaaaaaatagccatactatttaattgcaacaaggctgggaagaggaggatcgaagtatgttcgttgacagacagcgaatcgatctgctgaaccggttgatcgacgcacgcgttgacctcgccgcatacgtgcaactgaggaaggcaaaaggatacatgtccgtcagcgaaagcaatcatctacgagataacttttttaaactgaatcgcgaactgcacgataaaagcctgcggttgaatcttcatctggatcaggaagagtggagtgctcttcatcatgctgaagaagcattagcgacagccgcagtatgtttgatgagtgggcaccatgattgcccgactgttattaccgtcaacgccgataagcttgaaaattgtctgatgagcttaacgctgagtatccagagcctgcagaagcacgccatgcttgagaaggcctgaaaactaagggggagaaagcgtctcccccttcatgtttaagtttttgtaaaaatgaatttgttatctcctccactgactacgctttaagccagagtcaatccggaggcgttatgcatcgacaatcctttttccttgtgccccttatttgtctttcttccgctctctgggcggctcctgcaacggtaaatgtcgaagtactgcaagacaaactcgaccatccctgggcactggcctttttacccgataatcacggtatgttaatcactctgcgcggcggcgagttgcgtcactggcaagcaggaaaaggattatctgcgccgctttccggagttccggacgtttgggcgcacgggcagggcggcctgctggacgtggttttagcgcctgattttgctcagtctcgccgcatctggttaagttattccgaagttggcgatgatggcaaagccggaactgctgtgggttatggccgcttaagtgatgatctcagtaaagtgaccgacttccgcaccgtctttcgccagatgccaaaactgtctaccggcaaccattttggcgggcggctggtattcgacggtaaaggttatctttttattgctctgggcgaaaacaatcagcgcccgacggcgcaggatctggataaattacagggcaaactggtgcgtctgaccgaccagggcgaaatcccggatgataatccttttataaaggaatccggtgcgcgcgccgagatctggtcttatggcattcgtaatccgcaaggaatggcgatgaatccgtggagtaatgcactgtggctgaatgaacatggcccgcgcggtggtgatgaaattaatatcccgcaaaaaggcaaaaactacggctggccgctggcaacctggggaatcaactatagtggctttaagataccggaagcgaaaggggagatcgtcgccgggaccgagcaacctgttttttactggaaagatagccccgctgtgagcggcatggccttctataacagcgataaattcccccagtggcagcaaaaattatttattggcgcgctgaaagataaagatgtcattgtgatgagcgtcaacggcgacaaagtgacagaagatggccgtattttaacggacagagggcagcgaattcgtgatgttcgcactggacccgacggttatttatacgttctcaccgacgagtccagtggggaattacttaaagttagcccacgcaattaactaacgggaatcatcaccactttgcgcactgcggggcgttcagtgagttgctgataccagcgttgcagatttggacgcggtgtccaggtcaggccaacgttaaacaaattgtagatgaacggtgcgatagcgatatcgcccacaccaaactcgtcgccagagaaccattttacttttgccagttccgcatcgagcagggcaaacagggcgtcgcactctttgcaactggcatcaatggcggcctgatcgcgctcttccggtggtgttctgactaatcccatcaggatcccgcgatgagcattactgagcgtctggtttgcccagtccatccatttttccgcttccgcacgacgtgccggactgtcgatccacaggcgtttttgcccgtactgtgccgccagatagcggacaatggcgttactttcccaaagaatgagatcactttcgtcgtcacgcaacaacggcaccagcccgttagggttcatcgccagaaaatcagcatcgtgatttatcccaaactcacggcccgcgagaatttgctcataaggtagttccagttcttcgagcgtcagcaatactttttttacgttagtactattattccgaccccacagcgtaatcatactcaccccttttccgacaggcagccacaggctgaacaggactccgatggtgaagtaaagttaacttttaagcaacagctggcaaaaaaatgacaccagaagcagcgaagcggcaggatattgcataaactttaaaaactttaccaacttacggtttctttaagtttgtgtgtgcgttattaatcaccaaacttatcatacggcgatataacgtattttttttgaatggatactcgggtggcatttatgacgcaatactcctctctccttcgtggtcttgcagcgggttctgcatttttattcctttttgccccaacggcattcgcggcggaacaaaccgttgaagcgccgagcgtggatgcgcgtgcatggattttaatggattacgccagcggtaaagtgctggcagaaggcaatgcggatgagaaactggatcccgcgagcctgactaaaatcatgaccagctatgtggttgggcaggcgcttaaggccgataagattaaactcaccgatatggtgacggtcggtaaagatgcctgggcgacgggaaatccggcactgcgtggtagtagcgtaatgttcctcaaaccgggcgatcaggttagcgtggcagacttgaacaaaggtgtgattatccagtccggtaatgacgcctgtattgcgctggctgattacgttgccgggagccaggagagttttattggtctgatgaatggttatgccaaaaaactgggtctgaccaacactaccttccagacggtgcacggcctggatgcgccggggcagttcagcaccgcgcgcgatatggcattgctgggtaaagcattgatccacgatgtgccggaagagtacgccattcataaagagaaagagttcaccttcaacaaaattcgtcagcctaaccgtaaccgtctgctgtggagcagcaatctgaatgttgatggcatgaagacaggaaccacggcaggcgcgggatataatctggttgctagcgctacccagggcgatatgcgtttaatctccgtagtgttgggggcgaaaaccgaccgtatccgttttaatgagtctgagaaattattgacctggggtttccgcttctttgaaaccgtgacgccaattaaacctgatgccacctttgtgactcagcgcgtctggtttggtgataagagcgaagtgaatctcggggcaggtgaagcgggcagtgtgaccataccgcgtgggcagctgaaaaacctgaaagcgagttatacgttaacggaaccgcagcttaccgcaccgctgaaaaaaggtcaggttgtcgggaccattgatttccagcttaacggtaaatccattgagcagcgtccgctgatcgtgatggaaaatgtggaagagggcggattctttggtcgggtgtgggatttcgtgatgatgaaattccatcagtggttcggcagctggttctcttaatcttctgataaccggatggcgcgaaacgtcatccggttatacgtcattaatacatcaacttaatgcgctgcgtctgcgcgtacttcacatactcatcttccgggcaacaatcgctcaccacaatatcaaagcgtttcaggtcacccatgcgcgccggacgcaccttgccaaatttactgtggtcgacaaccagcacatgcttttgcgccatgctcatggcccagtgttttaccggcaactcttcaagattaaaacaggtagcgcctttactgacatgcacgcccgccgcagaataaaaagcgatatccgggcaaaaattattcagcgtttgctgaaaatcgatgggtttgaaaatggcgttgctggcgtgaaattcaccaccgcaaagaaacgcgcggcaatggggtttctctttcagcgccagaaaggtatttaggctataacaaacggcggtaaaagggatttcattatcaatcgcttcaataatccacggcgtggtggtgccacagtcaaaaaagagggtctgatcgggttctaccagcgtcgcagccagttttgccgcccggcgtttttcttccaccaggcgggatttttgatcgcttaacaggtaatggctggcactgcgcggttccagaacaatatagccgccgagcaaaacgacgggcgcactgtggttgttcagatcgcgacgaatcgtcatctcgctaaccccaagcagggcggcggcgtctttaagatgtaacttatcgctgcgttttaattcttgcagcagctgcccgatacgctcttcgcgacgtgtttccataatccctctgaatagttattgaagcgagccgctcaatactacactttttagcagagatcagtcacgcacccagcctttgcggatcggtaatgcaaaacagacgcgataccagctttgcagacgttgatagagtttatgccccatcgcttgccagataatctgggcactaaggcagccaatcatacctgccagcaatccaccgagcatatccagcggccagtggacgccaagataaacgcggctccaggcaatgacgacggccagcaccattaaaagactgccggaccacaggcgatgccagcataaaaatgccagtgcaaaggtgaaaatcaccgtaccgtgatcgcttgggaaactgtcatccgccgcatgatgcaggaagttatagccgatattttcgacaaagggtcggtcgtgcggaaaaagatgtcccatcgtccaggacacaaacaggctgaccgccagcgcgatagcgatttttatcaccagttgccgttgtgctgtaagcccccacaaccaaagtaccacggccagcaacggcaccacggtaatcaaatctttagcaataaaaatcgccaagctgatcatccacggagcgctgtctggcgtcgcgttaataagagagaatagagagagattcaaattttccagcataacttcccgacgcaaagtgattaaaagggagccaatacaggcaagtcgttgagaataaagtgcaggttaaactgggtaaagcggcatcgtcttatttccctcaagcggcctgtttacggtgggtgattgtaacgggcataggttaaataaaacttaaagaaagcgtagctatactcgtaataatgtaagaatgtgcttaaccgtggtttcagctacaaaattcgctttctcgttagctgcgcttttattaaactctgcgcgattattattggcgaagaaattgcatgcaaaataaattagcttccggtgccaggcttggacgtcaggcgttacttttccctctctgtctggtgctttacgaatttagtacctatatcggcaacgatatgattcaacccggtatgttggccgtggtggaacaatatcaggcgggcattgattgggttcctactagcatgaccgcgtatctggcgggcgggatgtttttacaatggctgctggggccgctgagcgatcgtattggtcgccgtccggtgatgctggcgggagtggtgtggtttatcgtcacctgtctggcaatattgctggcgcaaaacattgaacaattcaccctgttgcgcttcttgcagggcataagcctctgtttcattggcgctgtgggatacgccgcaattcaggaatccttcgaagaggcggtttgtatcaagatcaccgcgctgatggcgaacgtggcgctgattgctccgctacttggtccgctggtgggcgcggcgtggatccatgtgctgccctgggaggggatgtttgttttgtttgccgcattggcagcgatctcctttttcggtctgcaacgagccatgcctgaaaccgccacgcgtataggcgagaaactgagtctgaaagaactcggtcgtgactataagctggtgctgaagaacggccgctttgtggcgggggcgctggcgctgggattcgttagtctgccgttgctggcgtggatcgcccagagcccgattatcatcattaccggcgagcagttgagcagctatgaatatggcttgctgcaagtgcctattttcggggcgttaattgcgggtaacttgctgttagcgcgtctgaccagccgccgcaccgtacgtagcctgattattatgggcggctggccgattatgattggtctattggtcgctgctgcggcaacggttatcagtagccacgcgtatttatggatgactgccgggttaagtatttatgctttcggtattggtctggcgaatgcgggactggtgcgattaaccctgtttgccagcgatatgagtaaaggtacggtttctgccgcgatgggaatgctgcaaatgctgatctttaccgttggtattgaaatcagcaaacatgcctggctgaacgggggcaacggactgtttaatctcttcaaccttgtcaacggaattttgtggctgagcctgatggttatctttttaaaagataaacagatgggaaattctcacgaagggtaaaaaaatgcctgactgctttgtgcgatcaggcattctcgaattaatggtgatggtcgtcaatctggtgttcgataaccatcccttcacctacgctggcaagatggcgaacataaggatgcgggcggtaagccggagctggcgcaggagccacatagacggtttgcggcacagtcgcgacgctgaccgcttgtggaacgctgacactatcaggaaccacaaccactttgtatccactcggcacatcgacggtgacactttgcgccatcgccacaccagtaaagcccattaaaagcgcgcccaacagtagacaatttttcataatcatttcgcctgaaataatgcagcgggttaatttccgcgaattatgcagccttcattcaggcattgtgttgccgggcgtgctgccggttttattggtcaaatggcgcttcgtgtttaagaactttatcgatcacatccagtacgccttcacggttattggagcctgcgcggtattttgccgctgcgacgaccgcgctaccggcattttccattgcaaaactaaagcctgcctgacgcagcatctcaatatcgttaccgccatcgccaaagaccaccacttcgctgtcgtctattccccataatttctgcagttggcgaaggccattggctttatgtacgccggggataatcagatcgatgctgccgttgccggtgtggacgctcaccataatatcgccgatggcctcatgtaatgctttttgtacttgtggaatcagttcatcggaaagattcaggccaaacttaaagaagatatcctctaagttgtcaaagttatcgacgtattccagacggtgataatacatttccgccaccgttttcatggcatcgtcatattttttgagtgtataggcactattttttccgcaggcaataatttccacttccgggcgcgtcagcaaatgttccacgacagtagcaaacgcatccttgcttagctcgccattaaaaacatctttgccttcgctcactacccagccgccgttttcagccacaaaggcaatttcattagcaatttcagggaagaaagagatcaactgataatattgattcccgctggcgactacaaagcgaattccttgtgctttcatttgctgatactgagccataaaccgctcacggttataggttttttgatcgcttaagaaagtaccatccatgtctaccgcaattaatttaatgctcatcaactattctccatcgccgtctgcgttttggtatcgggtttggcgacggctttcgcgacaatagccgcgagaataaccagcgccagtacaaccagcattgcactacgtaatccataatgttcgccgagatagcccagcagcggcggcccgacgaggaaagccagataaccggtcgttgctaccacactgacgcgggttggtgcatcggggccggtatcgctggcggcagaaatggtcagcgggaagcccaggctggcacccagtccccagagtacaacagacaccccagcgacccaggcgctatcgacaaaaataatcagcccaatacccaacgcccccattagtgcactggcccgaaccacggcaacgcgactgtaacggtcgatgaaccaaccgccggtgaagcgtccaacggtcatccccagggtaaaaccggcataaatcaggctgccggaagtagggctaaaaccgtgaccgtcaaccattaataagggtaaccagtcgttggcagaaccttcggcaaaggccatcgccagcaccacaacacctatcagcagcaactggatatcgcgataaaaaggtacgcctttttcgccatgctgggtgccatcggcagcatttttgcccgtaccgtcagggattgcctgaatggcgatataaataggtgcgatacctaccagcgccgccaataaaatgtgcaccgttgccggaacgccaaaggccgtcagtgccatcccgacacctgcgcctgccagcgtgcccaggctataaaaaccgtgcatcatcggcaaaaccgtcttattcatttctcgctcaacggcagcaccttcaacgtttatcgccacttccgcagaaccaaaacttgccccaaagacgccgagaccaacggcaaagagcagggggcttgtcagccagagtgccagacttaatatcatcatcccgatcaatgcgcaggacatcgtgaccaggatgacattacgtgtcccaaagcgtttcactaaccacgcgctgcagagaataccgctcatgctaccgatgctcagaccaaagagaacaccgcccatttcagcgatgctgacagagagaatatcgcggatagcaggcgtacgggttgcccaggacgccattaacaggcctggcaaaaagaagaacataaacagcgcccaggttcggcgtttcaatgcattacgactagaatttacggtcatagatcacgtcaaaataagaagagggaagacaacattagcaaggttgtgtacatttgtacacaattgcagagagaggaaatgacatgcgtcgcgctaacgatccgcaacggcgagaaaaaattatccaggccacgctggaggcggtgaaactttacggaatacatgctgttacgcaccgcaaaattgctacccttgccggggtaccgttgggaagcatgacctactattttagtggaattgatgagttgttactggaggcgttcagcagttttactgagatcatgtcccggcaatatcaggcattttttagcgatgttagtgatgctccgggcgcatgccaggctatcaccgatatgatctacagcagtcaggttgcaacgccggataacatggagctgatgtaccagctctacgcgctggctagccgaaaaccgctattaaaaacggtaatgcaaaactggatgcagcgcagtcagcaaacgctcgaacaatggtttgaacccggaaccgcccgcgcgcttgatgcgtttattgaggggatgacgctgcattttgtcaccgaccgtaagccgctaagccgcgaggagattttgaggatggttgagagggttgcagggtaatagataagttttagataacaaaaaacccatcaaccttgaaccgaaatggcggggttgatgggctccacaaaatggggacatcaaagaaaagcagtggcactaattaagactgatgccctgcggaaaagttctgcggttgtgcaaaaaaatttcattttcagggcaacttcagttttatcctaatcctggccataccatgacgatgattgtccctgccagcgtcagcaggacgttggcgattgcataggtgcccgcatagcccagcgccgggatgttactgcgagctgtatcactgatgatctccattgccggcgcgcaggtacgtgcgcccatcattgcgccgaacaacagcgcgcggttcattcgcaatacataagcaccgaacaagaaacagataaccacgggcaccagactgacaatcaatccggcaatcaacatctgaccgccaatcgcgcccaggccgttattaataccgctaccggcgctcagaccaacgcctgccataaacaccatcaagccgaactctttcaccatgcttaatgcaccctgcggaatgtaaccgaaggtcgggtggttagcacgcataaagcccagcataattccggcgaataacaacccggcagcgttccccatgccgaaactgaatgtgctgaactggaaggtgatcatcccgatcatcagcccaataacaaagaaggcgcagaatgccagcaggtcagtgacctggctgtgaatgctgataaagccgatgcgatcggcgatggtttttacgcggcgggcatcgccgctgacttgtaaaacgtcacctttgttaagcacgacgttgtcatctatcggcatctcaatctggctacgaatgacgcggttaaggaagcaaccgtgatcggtcaacttcagttgtgcgagacgtttacctacagcgttatggtttttaacgaccacttcttcagtgacgatacgcatgtcgagaaggtcacgatcgaaaacttctttaccgttacggaagctgggatcgagtcgggcatgggcgtcgggatagcctaccaacgctatttcatcgcccatttgtagcacggcatcaccgtctggatttgccagaatcccgttacgtcgaatacgttcaatgtagcagccggtttgtcgataaatacccagttcacgcagatttttgccgtcggtccaggccaccagttccgggccgacgcgataggcgcggatcaccggtaaataaaccttacggttggcatcagtgtccaggccacgttcgcgggcgatttgctgggcgctggtctgtaagtcctgatgctgcaatttcggcaagtaacgcgcaccaacaatcaaactcaccagaccgattaaataggttaaggcatacccgaggctcagattatccagtgccagactgagctgcctgctttccatgccggaatgacgcagtgtatcgccagcaccgaccagaaccggtgtgctcgtcatagagcctgctaacataccggccgtcaggccaatatcccagccaaacagcttacctaaccctaaggcgatcaccagcgcactgccaaccatcaccagtgctaacattaggtaatttttcccatcgcgaaaaaaaatggaaaaaaagttcggtccggcttcgaccccgacgcagaaaataaacagcataaagccaagattaagcgcatcggtgttaatgctgaaatgttgttggcctaataacaggcttacgactaaaacgccaatggaattacccagttggatgctaccaagtcgtaactttccgagacatagcccaagcgcgaggaccacaaataataacagaatgtaattcccatttaacaattcggcgacgtttatattcacggaggctaacttcttgtttactagtaagctgttgaaagaaatggtaatttacgataatgttttttaccagaattcagggcgcagattcattcagcgcacctaaacgatagtaaagtaacaatatattttactagtgtaatcacattaggtatcaacggctatatgaattgcgttggcctatattagcatggaatgcgaagcggctttatcttactgaacgccacactggcgaaaaatgtgttcgatagacgcagtgtcaggaggaacgagtgaaacataaacaacgttgggcgggggcaatctgctgttttgtcctcttcattgtggtgtgcctttttctggcgacgcacatgaaaggcgcttttcgggctgccgggcatcctgaaatcggcttgctatttttcattcttcctggagcagtcgccagcttctttagtcagcgtagagaagtcctgaaacctctgtttggcgcaatgctggcggcaccctgtagcatgctcattatgcggctgttttttagtccgacgcgcagtttctggcaagagctggcatggttactaagcgcggtgttctggtgtgcgctgggggcactgtgtttcttatttatcagtagtttgtttaaaccacagcacagaaaaaatcagtaaagccctcaacgcgagggcttgtcagacgatcaggcgtccagattttctttcacccatgcagcaaaatcggtatagccgccgatatgttgctgatcgacaaaaatctgcggcacggtttctacgggtttacctgccttttgttgtagatcttctttagtgatcccttccgcacgaatatctacatactgatactgaaaatcatcgcgttcattgctcaatttctcagccagatcttttgcacgcacacagtaagggcaaccgctacgaccaaaaataacggtttgcattatttctctcctcatagatttatgcctgtaatgatcacgctaaaatgtattcgctgaaagtaggtttaacctgttgcattaattgctaaaagctataactgttaaacacaatacagtgaaaagttttagactgaaggctcactttgcagagggaagcgtatgcgcgcgatcggtaaattgcctaaaggcgtgttgatactggaatttatcggaatgatgctactggcggtggcgctgctgagcgtaagcgactccctgagcctgcctgagccattttctcggccagaagtgcagattctgatgatttttctcggtgttttgctcatgcttcccgctgcggtggtggttattcttcaggtggcaaaacgtcttgccccacagctgatgaaccgtccaccgcaatatagtcgtagtgaaagagaaaaagataatgacgccaaccattgaacttatttgtggccatcgctccattcgccatttcactgatgaacccatttccgaagcgcagcgtgaggcgattattaacagcgcccgtgcgacgtccagttccagttttttgcagtgcagtagcattattcgcattaccgacaaagcgttacgtgaagaactggtgacgctgaccggcgggcaaaaacacgtagcgcaagcggcggagttctgggtgttctgtgccgactttaaccgccatttacagatctgtccggatgctcagctcggcctggcggaacaactgttgctcggtgtcgttgatacggcaatgatggcgcagaatgcattaatcgcagcggaaagcctgggattgggcggggtatatatcggcggcctgcgcaataatattgaagcggtgacgaaactgcttaaattaccgcagcatgttctgccgctgtttgggctgtgccttggctggcctgcggataatccggatcttaagccgcgtttaccggcctccattttggtgcatgaaaacagctatcaaccgctggataaaggcgcactggcgcagtatgacgagcaactggcggaatattacctcacccgtggcagcaataatcgccgggatacctggagcgatcatatccgccgaacaatcattaaagaaagccgcccatttattctggattatttgcacaaacagggttgggcgacgcgctaaaaccgccacgtcgatgtatgatacgcgggcttttgaccaggtctgacagagaggtgcagggtgaaaattgccatattgtcccgggatggaacgctctatagctgtaagcggctgcgtgaagccgctatacagcgcggtcacctggttgaaattcttgatccgctttcttgctacatgaacataaatcctgcggcgtcttctattcactacaaaggccgcaagttaccccattttgacgcagtgatcccgcgtattggcaccgccattaccttttatgggacggcggcactgcgccagttcgagatgctggggagctatccgctcaatgagagcgtcgccattgcccgggcgcgtgacaaattgcgttccatgcaactgctggcgcgtcagggcatcgacctgcctgtcacgggcattgcgcatagcccggatgataccagcgatttaatcgacatggtcggtggtgcgccgctggtggtcaagttggttgaaggcacgcagggaattggcgtcgtgctggcggagacgcgtcaggcggcggaaagcgtgattgacgctttccgcggtctgaacgcgcatattctggtgcaggaatatatcaaagaggcgcaagggtgcgatatccgctgtctggttgttggcgatgaagtggtcgctgcgattgaacggcgggcgaaagagggcgattttcgttccaatttgcatcgtggcggcgcggcaagcgtcgccagtatcacaccacaggagcgtgaaatcgcgataaaagccgcgcgaacgatggcgctggacgttgctggtgtggatattctgcgtgctaatcgcgggccgttggtgatggaggtgaatgcgagcccggggctggaaggaatagaaaaaaccaccggtatcgacatcgcgggtaaaatgatccgctggatcgaacgccacgctacgacagaatattgcctgaaaacgggtggttaatcgcaatcacattactgatcatggttttgcctgcgctttttgcgtaagctgtgccggtctttttatcgaaagaggttgtacaaaattatgacaagcctggtcgttcctggtctggatacgctgcgtcaatggctcgatgacctggggatgagtttttttgaatgtgataactgtcaggctctgcatctgccccatatgcagaatttcgacggtgtctttgatgccaaaatcgatctgatcgataacacgatcctgttttctgccatggcggaagtccgacctagtgccgtattgccgctggcggcggatttatctgccatcaatgccagtagcctgaccgtgaaagcatttcttgatatgcaggatgataatctgccaaagctggtggtttgccagtctttatccgttatgcagggcgtaacctatgagcagtttgcatggttcgtgcgtcagagcgaagagcagattagcatggtcattcttgaagctaatgcccatcaactgctgttaccgactgatgatgaagggcaaaacaacgttaccgaaaactatttcctccactgataactcctttcgagcacgcagtcgctggtgcagtggctgcgcgctgcaaaattatctgctgtttttaaccttttcttaaagattatttcacttctcttgtgtcgatttggctttatcacatagagcaaatatgcataaaaatttgttaaataccgttttttaatccgagctatagtctcaaaccctggctaaagttattcttgcgatgcttttatatagcgagcagtgctggccgggagaaagttctcttttcttacaccgcgccgataaaaaatatgcacgtttattgcatatctttcagtgtgacaacttttgttcgtttgttaacgaactttcagaaggaaagagatatgaccgccttaaataaaaaatggctaagcggtctggttgcgggtgctctgatggccgtctctgtcggcacgctcgcggctgaacaaaaaacactccacatttataactggtctgattatatcgccccggacacggtggccaattttgaaaaagaaaccggtattaaagtcgtctacgatgttttcgactctaacgaagtactggaaggcaaattaatggccgggagtaccggctttgatctggtggttccatctgccagctttctggagcgccagttgactgcgggagttttccagccgctggacaaaagcaaattgccggagtggaagaatctcgacccggaactgctgaagctggtcgccaaacacgatcccgacaataaatttgctatgccctatatgtgggcgacgaccgggattggctataacgttgataaagttaaagcggtgctgggcgaaaacgcgcccgtcgatagctgggacttgatcctcaaacctgaaaatctggaaaaactgaaaagctgcggtgtctctttcctggatgcgccagaagaagtttttgctaccgtgttgaattatctcggcaaagatcccaacagcactaaagcggatgattacaccggaccggcaacagatctgctgttaaagctgcgcccgaacattcgttatttccatagttctcaatacattaacgacctggcaaacggcgatatttgcgtcgctatcggctgggcaggtgatgtctggcaggcgagtaaccgcgcgaaggaagcgaagaatggcgtgaatgtcagcttcagcattccaaaagaaggggcgatggcgttctttgatgtattcgccatgcctgcggatgccaaaaacaaagacgaagcctatcagttcctgaattacctgctgcgcccggatgtagtagcgcatatttccgaccatgtgttctatgccaacgccaataaagcagccacgccgctggtgagtgcggaagtccgtgagaacccaggtatttatccgcctgcggatgttcgtgcgaagctgttcactctgaaagtgcaggatccgaaaatcgaccgtgtgcgcacccgcgcgtggaccaaagtgaagagcggaaaataatccgcagtcgtagatgccggaggggcgcaccacacccgccggcaattcgcaccattatggtgcgcttgcacacattcaatgccggagagcagccgtgaatgacgctatccctcgcccgcaggcgaaaacccgtaaggcgctgacgccgctattagaaatccgcaacctgaccaaatcctacgatggtcaacatgcggtggatgatgtcagcctgaccatctacaaaggtgaaatcttcgcgctgctgggcgcatccggctgtggcaagtccacgctgctgcgtatgctggcaggtttcgaacaaccttctgccggacagataatgcttgatggcgtcgatttgagtcaggttccgccttacctgcgccccatcaatatgatgtttcagtcttacgcgctgtttccgcatatgaccgtggaacagaacatcgcttttggcctgaaacaggacaaactaccgaaagcggaaattgccagccgggtcaatgagatgctcggcctggtgcatatgcaggagttcgccaaacgcaaaccgcatcagctttccggtggtcagcgacaacgtgtggccctggcccgaagccttgcgaagcgcccgaaactattactgctcgatgagccgatgggcgcgctggataaaaagctgcgtgacaggatgcagcttgaagtggtggatattctggagcgcgtcggtgtgacttgtgtgatggtcacccacgatcaggaagaggcgatgaccatggcggggcgcatcgccattatgaatcgtgggaaatttgtccagattggcgaaccggaagagatctacgagcatccgactacccgctatagcgccgaatttattggcagcgtaaacgtctttgaaggcgtactcaaagagcgtcaggaagatggcctggtgcttgatagcccggggctggtgcatccactgaaagtcgacgcggatgccagcgtggtcgataacgtgccggtacatgtggcgctgcgcccggaaaaaatcatgctttgcgaagagccgcccgccaatggttgtaacttcgcggtgggggaggtgatacacattgcctatctcggcgatcttagcgtgtatcacgttcgtctgaaaagtgggcagatgattagcgcccagctacaaaacgcccatcgtcatcgtaaagggttaccgacctggggcgacgaagtgcgtttgtgctgggaagtggacagctgtgtggtgctgacggtttaaggagcaaagatgagtacacttgaacctgctgcccagagcaaaccgccgggcggatttaagctgtggttgagccagctgcaaatgaagcatgggcgcaaactggtcattgcgttgccatatatctggttgatcttgctgtttctgctgccatttctgattgtctttaaaataagcctggcggagatggcgcgcgctattccaccttataccgaactgatggagtgggctgacgggcaactgtccatcactcttaatctcggtaattttctgcaactgaccgacgatccgctctatttcgatgcttatctccagagcctacaggtggctgcgattagcacattttgctgtttactgatcggctatccgctggcgtgggcggtggcgcacagtaagcctagcacccgtaatattttattactactggtgatcctgccgagctggaccagctttctgatccgcgtttatgcctggatgggaatattaaaaaacaacggtgtgctgaataattttctgctgtggctgggggttatcgatcaaccgctgaccattctgcataccaatctggccgtttatatcggcattgtttacgcttacgtgccgtttatggtactgccgatttataccgcgttgattcgtattgattatagcctggtggaagcagcgctggatctcggtgcacgaccgctgaaaacgttctttactgtgatcgtgccgctgactaaaggtgggattattgccggaagcatgctggtgtttatcccggctgtgggcgagtttgtgatcccggaactgctcggtggcccggacagcatcatgatcgggcgcgtgctatggcaagagtttttcaataaccgcgactggccggtggccagcgcggtagcgatcatcatgttgctgctgctaattgtgccgataatgtggttccacaaacaccagcaaaaaagcgtgggagaacacggatgaataatttaccggtagttcgtagcccctggcggattgtgattttgctgctgggctttacctttctctacgcgccaatgctgatgctggttatctatagctttaacagcagcaagctggtgacggtgtgggccggctggagtacgcgctggtatggtgagttattgcgcgatgacgcgatgatgagtgcggttggtttaagtctgacaattgcggcctgtgcggcgacggcggcggcgatcctcggaactattgcggcggtggtgctggtgcgctttggcaggtttcgcggaagtaatggctttgcctttatgatcaccgcgccgctggtaatgccagatgtcatcacgggcttgagcctgttgttattattcgtcgcgcttgctcatgccattggctggcctgcggaccgcggtatgctcaccatctggctggcgcatgtcactttttgtacggcttatgtggcggtcgttatttctagtagattgcgggaactggatcgcagcatagaagaagcagcgatggatctcggtgcgacgccgctgaaagtgtttttcgtcattacgctaccgatgatcatgcccgcgatcatttctggctggttactggcttttactttgagccttgatgatctggtgatcgccagctttgtttccgggccgggagccaccacgttaccgatgctggtcttttccagcgtgcggatgggggtgaatccggaaatcaacgccctggcaacattgatcctcggcgcggtcggaattgtcggatttatcgcctggtatctgatggctcgcgcagaaaaacagcggatacgcgacatccagcgtgcaagacgtggctgaagacactaaaatttgccaacctggctacataatgccgcgcatgtcgcggcattgttttcatggaagacgaaacgttgggattttttaagaaaacatctagttctcatgctcgcctgaatgtgcctgcgctggtgcaggtggcggcgctcgccattattatgatccgtggcctcgacgtgctgatgattttcaatacgctgggcgtgcgcggtattggcgagttcattcatcgcagcgtacaaacctggagtttaacgctggtctttttaagcagtctggtgctggttttcattgagatctggtgtgcgtttagtctggtgaaagggcgtcgctgggcgcgctggctatatctgctgacacaaatcaccgccgcaagttacttgtgggcggctagcctggggtacggttatccggagctgttcagcattcccggtgaaagtaaacgtgaaatcttccatagcctgatgctgcagaagctgccggatatgctcatcctgatgctgctgttcgttcccagcaccagtcggcggttcttccagttgcaataatgtgtataatcgtcgcccctgatgatgtgaaggtcaatgtatgcagtgcgcactttacgacgcgggtcgctgtcgttcctgtcagtggataatgcagccgattccagagcaactctccgctaaaaccgccgatcttaaaaatctgctcgccgactttccggttgaggaatggtgcgcgccggtgagtggcccggaacaagggtttcgtaataaagccaaaatggtggtgagtggtagcgttgaaaaaccactgctcggtatgctgcatcgcgatggcacaccagaagacctttgtgactgcccgctttatcctgccagttttgcgcccgtttttgcggcgctaaaaccgtttatcgcccgagcggggttaacgccctacaacgtggcgcgtaagcgtggcgaactgaaatacattctgctgactgaaagccagagtgatggaggcatgatgctgcgctttgtactgcgttctgataccaagctggcgcaactgcgtaaggcgctgccgtggttacacgaacaactaccgcagctgaaagttattaccgtcaatattcagccggtacatatggcgattatggaaggggagacggagatctacctgaccgaacaacaggcactggcggagcgttttaatgacgtaccgctgtggatccgtccgcaaagtttcttccagactaatccggcggtcgccagccagttgtacgccaccgcgcgcgactgggtacgacagctgccggttaaacatatgtgggatctgttctgcggtgtggggggctttggtttacactgcgcgacgcctgacatgcagttaaccgggatcgaaattgcaagtgaggccattgcctgtgcaaagcagagtgccgctgaactgggcttaacgcgtttgcaatttcaggcgctggactccactcagtttgccaccgctcagggggatgtgccggagctggtgctggttaacccgccgcgccgcggcattggtaaaccgctgtgtgattatctcagtacgatggcaccgcgttttatcatctactccagctgtaacgcccaaactatggcgaaagatatccgcgaactgcctgggtttcgtattgaacgggtgcagcttttcgatatgttcccgcataccgcgcactatgaagtgctgacgctgctggtgaagcaataaaaaagccgcatgtgcggcttcagattgctgacaaagtgcgcgttgtttatgccggatgcggcgtaaacgccttatccggcctacaaaagcgtgcaaattcaatacattgcatgggccatgtaggcctgataagcgtagcgcatcaggcaattttacctttgtcatcagtctcaagccgcggttgcggctttctgaatcttactgtgggaaccactggtcactgattttttgataagtaccgtcagctttaattgctgccagcgcgttattcagtttttccagcagggctttgttatccggacgtacagcgatgcccaggccggtgccaaaatattgcggatcggtcactttctcagtagcaacaccaagttgtggattggttttcagccattcgtttaccaccgctgtgtcaccaaataccccatcaatacgaccatttttcagatcgataaaggcattctgataactgtcataagagacagttttcacttccgggtgctgatcctgaatatatttctggtgcgtagtaccgttttccatcccaatacgtttgcctttcagatcggcaaacgttttgtaggtatcttttttggcaatcacgacggcactgttttcatagtagggcgtggtaaagcttacctgtttgctacgctccggggtgatatccataccggagattacggcgtcatattttctgaatttcagggacgggatcaggctgtcgaacgcgtgattagtaaaagtacattctgcctgcatttgtttgcacaaggcttttgccagatcgatatcaaagccgacaatctcattattagcacctatagattcaaagggtggataggtggcactaacgccaaaattgattttctctgcggcagaagcaccgaaagtaaaggaagcaagtaaagcggcaagaactaactttttcatgatggaactcccgtctgtcaatcttatgatttttggccgtgtctgcggcatgggataacaatgccatcaagtgaatttatatgcaataaacatgattaaataatttaaatgaaataaaaaagacggacaacttagtgggttgtccgtcttcattataagaatttatgcactatgtaggccggataaggcgtccccgccgcatccggcacaggcaccgtgctgatgtctgatgcgacgctggcgcgtcttatcagacctacaaaaccccccggcgaatgtacgcagccacattaatttcgccgttcgaatgccagcgctttgcgctcgatcagacgcatcatcagcgtcagcaggccgttaacgaccaggtaaataatccctgccgcaccgaacaccattacatcgtaggtgcgtccgtacaacaactggctgtatcccatcacttccatcagcgtaatggtgtatgccagagaggtacttttgaataccagcaccacttcgttggaataagaagagaggctgcgtttaaaggcatacggcagcaggatcgccagcgtatcttttttgctcattcccagggcgctacaggactgccactgaccttccgggatcgcacgaattgcaccgtaaaacagctgcgtggtatacgccgcactattcaggctcaacgcaatcagcgcacataaccacggttcactcaacaaatgccacagtgccggatactcctgcaaagtcggaaactggcccggcccgtaataaatcaggaagatctgcaccagcagcggcgtaccggtaaacagcgtgatataaccccgcaccagccacaccagcaccggcgttttcagcgtcaggatgatggtaaaaatcaatgccagaatcagtgccacaatcaggctggcaacggttagcgtcaggctggtgtgtagccctttcatcagttcgggtaaatactcaaacattagctgggcctccgctcaaaacgtgtcgcgcgcaggtcaatgcgtttgagaatgtactgactgagcagggtgatcaccaggtaaatcgccgccgccacaatgtaccaggtaaatggttcctgggtacgagtagcgatgctttttgtttgcagcattaaatcattcacactaatcaaactgaccagcgcggtatctttcagcagcaccagccactggttaccgaggccaggcagcgcatgacgccacatctgcggcatcaccagacggaaaaagatagcgcttttgctcagccccagcgcctgaccagactcccactgacccaccggcaccgctttcaacgcgccccgaagcgtttggctggcataggcggcatacagcagactcagagcgatgacaccacaaaggaacgggctaacgtcgaagttctcaatgtccatctgcactgggatctgcacgaacccaagattgatagtgaagccatcgctaagcgtcagcagcagctggctggagccaaaatagataaacagcaccaccagaatttctggcaggccacgcagaatggttaccagcgcactacctgcccacgcgacaggacgccattttgcgctctcccataccgcaaagaacatcgccagcgccagcccgacaatcaatgcacaaacggcaaggccgacggtcatcccggcggcgcttgctaaaggaaaaaattcattcatcaggaattacttctggaaccatttgttgtagatggtttcgtaagtgccatctttcttcactttttccagcgcagtgttgagtttctgctgcagctcagtgttgccctgacgtaccgcgatgccgaggccagtgccgaagtaatctttatcggtcactttgtcgcccaccgccgccagtttcgggttatctttcagccactcagtgaccactgcggtgtcaccgaagacgccgtcgatacgcccgttttgcagatccagttttgcgttctggtagctgtcatacggaacggtagtgatttccgggtgcttatccataatgaatttctggtgtgtcgtcccgttctgtacgccgacttttttgcctttcagctgatcaacactggtgtatttgccttgctgacccacaaacagggcagagttgtcatagtacggggtggtaaacagcacctgcttttcacgctccggagtgatatccatgcccgccatcacggcttctacgcgacggaatttcaggcttgggatcaggctgtcaaacgcctggttagagaaagtgcaggttgcatcaatctctttacacagcgcttgtgccaggtcgacgtcaaaaccaacgatctggttgtttgcatcaatgctttcaaacggaggataggaggcttcggtagcaaaacgaatggtttcggcagctgtggcggaaagactaaaacctgcaattaacgcggcaatcagaacttttttcattgttgttatcccgaatcttagtgagagagatagtttttaaatgcttcggtttgcggctcggtaaagcagctcgcgtcgccttgttctacgatatgaccattttccatatacaccactcggctggcggttttacgcgccacttcaacttcgtgggtgacgatcacctgggtaatattcgtttctgccagctcacgaatgatgctgacgatttgtgccgtaatttccgggtccagtgcggcggtcggttcatcgaacagcagtacctgcggttccatcatcaacgcacgggcaatagcaacacgctgctgctgaccaccagaaagatgcagcgggtaacgatcgctataaggtttgagacgcagacgttccagcagtttttctgcacgggccagcgcctgatctttactcaaccccagtacacggcagggcgcttcaatcaggttttgctgcacggtcagatgcggccacaggttgtattgctgaaacaccatgccaacgttacgacgcaaatcgcgaatcgctttgtcagagggtgttttggtgaaatcgaaatggttgcctgcaatgttgagcgtaccggagcgcggcatctcaagcagattgagtacacgcagcaggctgcttttacccgcgccgctggggccaagtaacaccagcgtttcgccctgtgggcaatccagcgtgatatcgaacagcgcctgatgcgcgccgtagaagcaattaatgccgtttaattgaatactcattgacactcgtatactggcagtctgatagctattgaggtcgaagatagtacctttgacagaataattatgcaatatttctgctttaaaagttaaaagcaaagcgcattattcaataaacatagcacaaaataacgggggcggtggtcggcgagcataaatgtcggcattcctcacgaaatgccggacaatttacggggtttattggttgatcaaggcgttagcgattctcgatggactgacggagcgtacccgccgtggcatgaacgctaccgcctaagtaacgcacatcgtcgatgacccaacactggccttcctgaatcattaacacttcatcctgccaaccctggtcaccctgtttgagatccacgcgcaatggaatgttacgggcatcacgattagggatagtgcttgcactggcaacgtgggcgctatctggcaaggtggttcgactggagaatggatcgttggtcagtagttcccgatggttattatcccgggaggcatcgctaagcagtgtcgccagtttgtcgctcagataagggcgcaaggcggtgatgtcgttgctgcggtgcaaaatgcggtagtcataaaattgctgggccacgttatccgggcctccttcaacgcaaggaccactgcgtgtgccgttatctttataagctggagtgactgtggtgcaggcactgaggagcagtgcgcaggggataagcattgtcaatttgctgtagcgcataatgatttccttataagcgatcgctctgaaagcgttctacgataataatgatatcctttcaataatagcgtatcagtctgataatgcttttgagatcgaaggcttagcaaacaaggagatcgatcatgcaattttctacaaccccaactctggaaggccagaccatcgttgaatattgcggtgtggtgaccggcgaagcgattttaggtgccaatattttccgtgatttctttgccggtatccgcgatatcgttggcggacgttccggtgcgtatgaaaaagaactgcgtaaagcacgggagatcgcctttgaggaattaggctcccaggcgcgggcgctgggggccgatgccgtcgtcggtattgatatcgactacgaaacggtcgggcaaaacggcagtatgctgatggttagcgtcagcggtacggcggtgaaaacgcgtcgatgagaagattcttctggctggtcgctgccgctctgttattggcagggtgtgcaggcgaaaaaggcattgtcgagaaagagggatatcagcttgatacccgacgccaggcgcaggcggcgtatccgcgcattaaagtgctggtgatccactacaccgcagatgattttgatagcagcctggcgacactgaccgataagcaggtcagcagccattatctggtccctgcggtaccaccgcgatacaacggtaaaccgcgcatctggcaactggtgccggaacaagaactggcctggcatgcggggattagcgcctggcgcggggcaacgcgccttaacgacacctctattggcattgagctggaaaaccgtggctggcaaaaaagcgccggagtgaaatattttgccccgtttgaaccggcacagattcaggcgcttattccactggcgaaagatattattgcccgttatcacatcaagccggaaaacgtagtggcacatgcggatatcgcaccgcagcgcaaagacgatccggggccattatttccctggcagcaactggcgcagcaggggattggtgcctggccggatgcgcagcgggttaacttttaccttgccgggcgcgcgccgcacacaccggtagataccgcgagtttgctggagcttttggcgcgctacggttatgacgttaaacctgatatgacaccgcgcgagcagcggcgcgtgattatggcattccagatgcatttccgcccgacgttatataacggcgaagcggatgcagaaactcaggcgattgccgaagcattgctggagaaatacgggcaggattaacgcggcagttttccgtggtcgcgtagccaggcggcagttttctcgataccttcatccagggtgatgaccggctgataacctaactcttcctgcgcacgcgtaatatccagcgtaaagtcaaaattcaacttggagacgccgtagtgggtcagcggcggctcttttgcactcttgcggcctaaacgctccatgctgcgggcgatcatatccagcatcgggtaggggacggaacgaatacgacagtcaatattcaactcgtcgatcagcttctgcacgatgctgcgcagtgtgcgatgctcgccgttggtgatgttgtacacacgcccggaaggtagcttatcgcaggcttcctggcttgccagccacattgcgtgcacggcattttcatagtaggtcatatcgaccagcgcactgccgccatgcggtaacagaatactgccgtagtggtgcatcatatgcgccagacggggaataaagactttatcgtgcggtccgaacagactttgtgggcgcagaatagtaaagcgcgtttgtggattcgcctggctaagcatattgatcacttcttcgctggctgctttgctgcgggcaaactcgttggcgaagcggtgagggcgaaaatcttctttaatatcgcgatggtggtgataatcgaagtacagggagggggaagagatatgaataaagttacgcacaccccaggcgacagcccattcacccaggcggcgagtggcgcgaacgttagccagatcgaaagcctgttgtgtcccccagggactggtaaagctggagcagtgccacagcgtatcaatgcccgcgagcatcactttagcttgactactaaccagctcggtcagatccgccggaacaaactctgcgcccattttttccagcaatttgcccattgcctcgttgcgaccggtcgctcgcacgctgatgcctttctggcataaaaactctaccgcgtttcgacctaagccgctggtggcgccggtaaccagtaccttcatatcaatccactgttgttgagaaaataacgtgcgcattcttccgtgatttcccccatgatgcaatgggaaacatgaaagaataacgcaggttttgtcgattaatctgtgctttgttctgccagtctggcgatttgttttgccattccgcgaaaaataaacagatgcgcggggatcatcaataaccagtaaaacagccccggcataccgtgcggatgccagaaagcgcggacatcgatagtacgatagtcgcctttatcttccaggctaaaacacagtcgtcccagccccggcgctttcatgccaaataacaacgtaagttgtttttccggttcaacgacaatcactttccagctatccaccgcatcgccagtctgtaaatattcgcgctccgggcggcctttcgccagcttatgaccgatcgcgcggtccatcaacgcccgtgtctgccacaaaatattgccaaagaaataacgctctttaccgccgatttggttcactacctgccataaagcagcaaggctggcggacgttttaacggtaaaccccgcctgtttggcaaaataaccgtactccggtcgccagcgggcaaaggcctgagcgtcgtagccccagtcgctggagttgaccagtttttcctcctctttcaacgtgctacgtaccgcgtcatcgaaagcgatcagccgttgtgggatgagtgcacgtagcgcggtatcatccgccagcagatcgtgtttcagcccctgaatcaacgccctggcggtggtgggcggtacggaagtaatcacattgagaaaccacacgctaatccagcgggtggggagggggatggggatcaaccagcggcgcttaccgctcaccgccataaaatgttcaaactgttgctgataactgagcacctctggtccggcggcttcgaagatgcggtgttcgctggccggatgatctaacaacgcaaccagatagtgcagcaagttttccagcgcaatgggcgtggtgcgactacgaacccagcgcggaggcgttaagactggcaggttgtagaccatatcgcgcatgacttcgaacgccgcggaacctgcgccaacgataattccggcccgcagttcggtcacgggtacattcgcttcacgcagaatgtccgccgtagcctgacgagcacgcagatgatcgctctgctcatgtggcggggcctgcaagctactaagaaagattaattgcttaactggtacttcacgtagcgcatcgcggacgttgagagccacctggcgctcctgagcgataaaatcgccgccttcgcccatgctgtgcaccagaaaatagaccgtatcgatatcctgcaacagggccggtaggttatccggccagctgagatcgactttatggcaactgacgtttgccagttgcagctttgcaagcctgtcgacatgacgtgccgccgccaggatctgatgcccttgctggctgagtgtgcgcaccagatgctgaccaatgtagccactggcaccgagaactaaaatgcgttgcggcacgtctctctccttaacgcgccaggaatgcacgccagtgggcggcgacttccgccagttgttcgcggctgacgtcaagatgcgtcaccaggcggacaatcgggctggcgttaatcagcacgtttctcgctttcatgtattcgcctaacgcggcagcattttcttccccgacgcgaacaaacagcatattggtgtcctgacgcatcacatccgcgcctgcttcacgcagctgctccgccatccaggcagcgttgtcgtggtcttcctgcaagcgcgcaacgttatttttcagggcatatatcccggcggcagccagaatgccggactggcgcatcccgccacctgtcattttccgccagcgaatggcacgtttaatgtaatcacgattaccgacgagtaaactaccgactggcgtcccaagacctttgctcaggcaaatggtgaagctatcacaatattgcgtgatctctttcagttcgcagccgtaagccaccacggcattaaagatgcgcgcaccgtcaacatgcagcgccagattgcgctcgcgggtaaattcccatgcttctttcaggtattcccgcggcaacactttgccgttgtgggtgttttccagactgagtaatttggtgcgggcgaaatggatatcgtcgggtttgattttcatcgccactttatccagcggtagcgtgccgtcggcagccgcgtctatgggttgcggttgaatactgcccagcaccgccgcgccaccggcttcaaacagatagttatgcgcggcctgaccgacaatatactcttcgccgcgttcgcagtgactgagcagagcgaccaggttggcctgagtgccggtaggcagaaaaatggcggcttctttaccggaaagctctgctgcgtagtcctgcagagcattaacggtagggtcgtctccgtaaacgtcgtccccaaccggggcggccatcatcgcttcgagcatggcgcggcttggtcgggtaacggtatcactgcgtaaatcaatcatggcatgtccttattatgacgggaaatgccaccctttttaccttagccagtttgttttcgccagttcgatcacttcatcaccgcgtccgctgatgattgcgcgcagcatatacaggctgaaacctttggcctgttcgagtttgatctgcggtggaatggctaactcttctttggcgaccaccacatccaccaacaccggaccgtcgatggagaaggcgcgttgcagggcttcatcaacttcagacgctttttctacacggatacccgtaatgccgcacgcttcggcaatgcgggcaaagtttgtgtcgtgtagttcggtgccgtcagtcaaatagccaccagctttcatctccatcgccacaaagcccagcacgctgttgttaaagacgacaattttcactggcagtttcatctgcactacactgaggaaatcgcccatcaacatgctaaaaccgccatcgccgcacatggcgaccacctgacgttctggctctgtcgcctgcgcacccagcgcctgcggcatggcgttagccatgctaccgtggttaaagctacctaacaggcgacgcttgccgttcatttttagataacgtgccgcccacaccgttggcgtaccaacgtcacaggtgaaaatagcgtcatcggcggcaaaatgactaatttgctgcgccagatattgcgggtgaatggctttctcgctcggtttagctaaatcgtccagccctttgcgggcgtcgcggtaatcttccagcgctttatccagaaacttgcgatcggctttttcttccaccaatggaagcaatgcacgcagagtgctcttgatatcgccgaccagtgccatatccaccttgctgtgagcgccgatgctggctgggttgatatcaatctgaatgattttggcatcggtcgggtagaaggcgcggtagggaaattgcgtgccgagtagcactaacgtgtcggcgttcatcatggtatggaaaccactgctgaagccgattaacccggtcattccaacatcatacggattatcgtattcgacatgttctttaccgcgcagggcatgaacaataggcgctttaattttcccggcaaactcaactaactctttatgcgcccccgcgcagccgctgccacacatcagggcgatattgctggaataacgcagcagttgcgccagtttgcgtaactcttcttcttccggcgtcacgactggttgtggcgcatgataccagtgcatggttgccccttctggcgcaggttttaacgccacgtcgcctggtaacacgacaacgctaacgccacggttaagcaccgctttgcgcatggcaatcgccagtacttgtgggatctgctccgggctggaaaccagctcgcaatagtgactacattcgcggaatagctcttgtgggtgggtttcctggaaatagccgctgccaatttcgctggagggaatatgagcggcaatcgccagtaccggaacgtgattgcggtggcaatcgaacaggccgttgattaagtgcaggttgccggggccgcagcttccggcgcagaccgccagttctccgctaagttgtgcttcagcgccagcggcaaaggccgccacttcttcgtggcgggtggacatccactcgatggtgcccatgcgattaagactgtcactaagaccgttcagagagtcgcctgtgactccccagatgcgtttcacccctgcgctttcgagtgttttggcgatataagctgcaaccgtttgtttcatggttctccatctcctgaatgtgataacggtaacaagtttagttcatctgacggagggggaagggatgggagagaaaggaggcactaacggttaaatagcccgatgaaaggaatatcatcgggcataaggcgattatgcgagaaccaaatccccctgcggatggcaggagcaggccagtacgtaaccttcagcgatttcggcgtcggtcagcgtcattgtgctgctcaccgtatattcaccggaaaccacttttgtcttacagcagccgcaaacacccgcacggcaggcagcgacaaccggaacgttattgctttccagcgcctccagtagcgtggtgccaaccggggcgtaaaattctcgtgccggttgcagtttggtgaatttcagaccgctggtcgccgcttctgctactggggtgaagaatttctctttaaagaaacgcgtcacgccgagcgctttcacttcctgctctacccaatccatatacggagccgggccgcaggtcatcacggtacgactagctaagtcaggtacacctgccagcagttcgcgagtgagacgaccagcgataaagccttcggtaacgttattttctgccaccagcgttaccggatagttacgccactcatcggcgaaaataacatcctgcggcgtacgcacgttgtagatcacccgcacatcggcctgtggacggttcttcgcaagccagcgacgcatgctcataatcggcgtgacgccgcagcctgccgccagcaacaggaatttatcttctgctttatcgtcgcaggtaaattcccccatcgcgtcgctaagccagagataatcaccgcgttttacatcgcgcgtcagccactgggagccgacaccgtcatcaatccgccgcacggtcagggtgatatattcactcacgcctggcgtggaggaaatggtgtaagcacgcagcgtttccgcactgtttcgcacgctgaccagtgcatattgcccggcgcgatatgggtagtaatcgtggcaaatcagggaaatcgtccacacatccggcgtttcttgcgtaatgtgatgaacctgcatccgccacgggcattgattcgttggcatcgtcatcgacaaactccttacgcgctcaacagttgcttcatgtcttcttcaacagtggtgatagaacgcaggccgaatttctcgttcagcaccgccagcaggtctggtgtcaggaaaccaggtgcagtcgggccggtgacgatatttttcacgcccagagaaagcagcgtcagcagaatgacgatcgctttctgttcaaaccaggagagcaccaggctcagcggcagatcgttgacaccgcagcccagtttctctgccagagtgacagccagaataatcgcactgtaagcatcgttacattgacctgcatctaccagacgcggcagaccttcgatatcgccaaactcaagtttgttaaagcgatatttaccacaggcgagggtcaggatcaggcagtcatccggcacgctggtggcgaaatcggtgaagtagtggcgctcgccgcgtgcgccgtcacagccaccaagcaggaagatatgacgcagtttttcacggctcaccagatcaatcagcgtatcagcagcgccaagcagcgtctggcgaccaaaacccacggtgataaggtgcggaatttcgctgtacgggaagcctgccatctgttgcgcctgggtgataaccgcagagaaatcatcaccgtccagatgacgcacgccaggccagccaacaatgctgcgggtccagatacgatcgtcataagcgcctacggttgggtcgatgatgcagttgctggtcatcacgatggggccagggaaacgagcgaactccacttgctgattctgccagccgctgccgtagttaccgaccagatgcttgaatttacgcagctccgggtagccatgcgcaggcagcatttcgccgtgggtgtagacattaacgcccgtgccttcggtctgttccagcaggttgtagagatctttgagatcgtgaccggaaatcagaatgcatttacccgccgtcgctttgacgttgacctgggttggcgtcgggtgaccgtatttaccggtttcgcctgcatccagaatgctcatcactttgaagttcatctggccgatttccatactacactcaagaagcgcgttcatatcggcaggccaggtccccagccacgccatgattttatggtactgggcataaatatcgttgtcgtattgaccgagaacatgcgcgtgttccatataggccgccgcacctttcaggccatacaggcacagcagacgcaggccgagaatgttttcgccaatcgccgctttatctttgttaggggtaaattctgctgcctgacgttgcagctcgccgagatcgtcgctcaccagttgcaggtcagccatcgggttatcgacgcgcgcgttggcatctacagccaggcattgcgctttcagcgcctcgcgcagggcaatcgcttcacgagcgtagccgacaatacgcggagaatcgaagttaacgttggtcagggtactgaaaaaggcacgtggcgcgaagctgtcaacatcgtggttgatgatgccgtattcacgcgcttttaccgcccaggcagaaagcccttgcagcgccgcgatgagtaaatcctgaaggtcagaagtttccgccgttttaccacacatcccctgcgcgtaactgcagccgtttcctgccggagtacggatagtttgttcacattgcacacaaaacatgatcacaccttttaaagttatatttaatatacatgtttaaggttaagacgcttaacgcggggataaaagggatttttcatgcaactttaagggagattgatttagcgcaattttggcggcagggatctaccgccagagaggtattacgcagagaaaaaggcgatgaggatcggcactaacaggctaagaataaaaccgtgaacaattgccgccgggaccatatccagcccgccagtacgttgaagaacgggcagggtgaaatccatacttgtggcaccgcataagcccagtgcagtagagcggctgcggcgaatcagcccagggatcaacataatagcaatcagttcacgggccagatcattaaaaaacgccgcgctcccgattaccggaccaaaagattcggtcaataaaataccggaaagagaataccagccgaaaccggaggccattgccagcgcggtattgatggggagatcaagaataaaggcgttaattaaaccaccaattaaactactgacaaccaccaccacggcgacaatcattccccggcgattaaggacaatctgctttaaggtcatgccattattgcgcaactgaataccaacgaggaaaagtagcaaaattaacgtgtattcactggcttcggtcgcgtgttgtaagaaagccagtccacttagaccaatggcaaaaccaatcactactacgccgcacagttttaggctctccagcgccatcgcaatacggctcgggagtttttcttgctgatggtggttgcgccacggcaggcctcgctccagccacatcagggcggcaatattacacagtaaaataacggtaatactgacggcagaataatgcagaatcgccaacaggttactggcgaggttatcgagaaacgccagactgatacccataaaaaagagaataaggtaaaccatccagcttaatagctgattaataacttttaacgcagcttgttggcgaagcggaatgaggtaacccacaatcaggggaaccagaatgattaacagcccagaaaacatgaaaacccagtccttgcaaagatgaagtcgaaatgcgcgatgacacactactgaaagcggaaggacgagtaaagttgcaattaaaaggaaatgttatgcataaggagcagtagagtattcgttttcatttaaagatattcttgcgctttaattacaaactgcaccgatgttggtggcgtcaaaatcgccgaggcgttccctgaaggccggggcagcccacatggatgtgggctgagggcgcgttttacagggatgttacctcgcgcccgacccggtagccgtaagggataagtcgagggcaccgcgcagcggcgattttgttcgccagagcccgggggtgcagggggcggcggcgattggccgccccctgcgcgctccttgcgccagtggcaatatgttgcttagctcatgaaaggagcgcaacaagatgatgaatcaacatataacaacatcttaaaaaaaggcctgacattacgccaggccttctgcgttaattaatcacgcttttccagcagggtccggtaaatcagaccaccgataatgccgccgacaattggcaccacccagaagaaccacagttgttctaatgcccagccgccctggaagatagcaaccgcggtgctgcgcgccgggttaacagaagtgttagtcaccggaatactaattaagtgaatcagggttaaggccagaccaatagcgatcggcgcaaaacctgccggcgcgaatttgtcggttgcgccgtggatcaccaacaggaaacctgcactcaataccagttcaactaccagcgcggaaagcatggaataaccgcctggactatgctcgccataaccgttagaagcaaaaccgctggctgccgcgtcaaaacccgttttaccactggcaattaaatacagcagcgccgctgcaacaataccgccgacaacctgggcaattacgtagccaacgacttcttttgccggaaaacgtccgccagcccataaaccaatagtgaccgccgggttaaaatgaccaccagaaatatgaccaacagcaaaggccatcgtcagaacggtcagaccgaacgccaacgccacgccggcaaaaccaatgcctaattccgggaagcctgcggccagtacagcactaccacagccaccaaaaacaagccagaaagtaccaaaacattcagctgctaattttctgaacatatccaccacaattaaaaattgaccctgtgaaaaatatggtcgttttatagggtcgtcgtaaaaaagtgacgacggaaataatgcgcggctattttaaaaacgaaggcgagtcattcaccagataaataaatccagtaaatttgatttagggcaacagcgggttgccccatatagtcatttgtctgattgacagtgtagtgcacgcaaaagatttaatcctttaggcgtaataaaaaataatttatcatgctaattatttgattttgttgtttttgcagacttatcagcaagagggagtataacgcgattattcgctcatttttcagacatttgccatgcttaaatgtgatgtcatcacgtattagcaaggcctttcccgttatactgccagcgtaaaggataagtcacatatttctggaggggatatgattcttgagcgcgttgaaattgtgggttttcgcggtatcaaccgtttgagcttgatgctggaacaaaacaacgtcctgattggggagaacgcgtggggtaaatccagcttgctggacgccttaactctgctgctaagcccagaaagtgatctctaccattttgagcgcgacgatttctggttcccgccgggagatatcaacgggcgagaacatcatctgcatattattttgaccttccgcgaaagcctgccaggccgacatcgggttcgccgttatcggccgctggaagcgtgctggacgccatgcaccgatggctatcaccgtattttttatcgtctggaaggggagagtgcggaagacggcagcgtgatgacactgcgcagttttctcgataaagacggacatccgattgatgtcgaggatattaacgatcaggcacgccatctggtgcgtttaatgccggtgctgcgcttgcgtgatgcccgttttatgcgccgtattcgtaacggcacggtgccaaatgtccctaatgtggaagtcaccgcgcgccagctcgatttcctcgcccgtgagttatccagtcatccgcaaaatctctctgatgggcagattcgtcagggactttccgcaatggtacagctgcttgagcattatttctctgagcagggggccggacaggcgcgatatcgtttaatgcggcggcgagccagcaatgagcaacgaagctggcgctatctggatatcatcaaccggatgattgaccgacctggtgggcgcagctatcgggttattttgctcggcctatttgctactttgttgcaggcaaaaggcacattgcgactggataaagacgcccgtccattgttgctgatcgaagatccagaaacccgtttacaccccattatgcttagtgttgcctggcatctgttgaatcttctgccattgcagcgcattgccaccaccaacagcggtgagttgcttagcttaacgccggtagagcatgtttgccgactggtacgtgagtccagccgcgttgccgcctggcgtctggggccgagtggcttgagtaccgaagatagccgacgcatatcctttcacattcgttttaaccgtccgagtagcctgtttgcacgctgctggttgctggtggaaggggaaacggaaacctgggttatcaatgaactggcgcgtcagtgcggacatcattttgatgccgaagggatcaaggtcattgagtttgcccagtccgggctaaagccactggttaaatttgcccgccgaatggggattgaatggcatgtactggtcgatggcgatgaagcagggaagaaatatgccgctacggtacgcagcctgttgaataacgatcgggaagccgaacgagaacatttaacggcgttaccggcgctggatatggaacattttatgtatcgccagggattttccgatgtgttccaccgcatggcgcaaatcccggaaaatgtaccgatgaatctacgcaaaattatcagcaaagcgatccatcgctcttccaaacccgatcttgccattgaagtggcaatggaggcaggacgtcgtggtgtggactccgtaccgacgctgctgaaaaaaatgttcagtcgcgtgctgtggctggcgcgcggtcgcgcggattaaccgcgaaacatcgtggccatttgtggctgaatagcgtcgagcatctcatagcgccgacggtattcagcccgttttttactggcgatttcggcaatctcttttcgtgctatctgtgctggaaggcggtaatggcgttcagcatcacatacgccgccaacgctttcccagaaagcgttgtaatcagcgtggatcttgccttctttatcgcgataacgcaggctgcggtaaatatgcgtttcattgctgacggcaataatctgctctacctgcaaacgttgggcaaacagacaggccgcttccatcacgaggcgtttgggaaatagcccgtggcaggctttcgtcgcattctggatttcctgatgtggaatttcccattttgcgccttgcagtccgccaataaacatcgttcttttcccctgatattcacacagggtaaacgtgatctctgccagaggaataccttcgctgttgcggaacaggattgtgctgtcaccttctttatccatactgatcatcatggtcagctcaagcgtgaactgctcgccgtttttgccttccagcttcgccagttgcagcccgggggtattcaaatataagctgaattcttccgcgctcatacattcgcggagtaacgcataatggtaacgtaacgcctccagcaattgcttacggctaagattcgccgcaaggtaagggcgatgcagacgcacaggcagtcgcggctggcgcgttaacaatacattgagattaggccagtgggaaagttcgttcatccactcaacgcttaaacgcggcataatcaagctgcgcagcaaaaatttctggcgaaaactacggcgatgccagaatttacccggccgacactgtccacgtgccagactaagaaaaagactcaggctgctgagagattcagatggcgtaaaggtccgttcagttagctggctcatattcatgaaatcaatggttatacatggcgtgcttttcaccattgcgtatcttaaccaaacatcaatagtgtgattactaacgtaaattttagggttttgttgatatttcgttgaagttaatgacccggattggcatatggagtattcagaaaatttatgaaaaagcggaaaaccgtgaagaagcgttacgttattgcgctggtgatagtcatcgccggactgattacgttatggagaattcttaacgcacccgtgccgacttatcagacgctgattgtgcgccccggtgatttacagcaaagcgtgctggcgaccggaaagctggacgcgctgcgtaaggttgatgtgggcgcgcaggtcagcggtcagttgaaaactctgagcgtggcgattggcgataaagtaaaaaaagaccagcttttaggggttattgatcctgaacaggctgaaaaccagattaaggaggtcgaagcaacgctgatggagctacgtgcgcagcggcagcaggcggaagcggagctgaaactggcgcgggtgacgtattcccgtcagcaacgtctggcacaaacgaaggctgttagtcagcaggatctcgacaccgccgcgacggagatggctgtgaaacaggcgcaaattggcaccattgacgcgcaaatcaagcgcaatcaggcttctctcgatacggctaaaaccaatctcgattacactcgcatcgttgccccgatggccggggaagtcacgcaaatcaccactctgcaaggccagacggtgattgccgcacaacaagcaccgaacattctgacgctggcagatatgagcgccatgctggtaaaagcgcaggtttctgaagcggatgtaatccacctgaagccggggcaaaaagcctggtttacggtgcttggcgatccactgacgcgctacgaggggcaaatcaaggatgtactaccgacgccggaaaaggttaacgacgctattttctattacgcccgttttgaagtccccaaccccaatggtttgctgcggctggatatgactgcgcaagtgcatattcagctcaccgatgtgaaaaatgtgctgacgatccctctgagcgcgttaggcgatccggttggcgataatcgttataaagtcaaattgttgcgtaatggtgaaacacgcgagcgtgaagtgacgattggcgcacgtaacgataccgatgttgagattgtcaaagggcttgaagcgggcgatgaagtggtgattggtgaggccaaaccaggagctgcacaatgacgcctttgctcgaattaaaggatattcgtcgcagctatcctgccggtgatgagcaggttgaggtgctgaagggcatcagcctcgatatttatgcgggtgagatggtcgcgattgttggcgctagcggttccggtaaaagcaccctgatgaatattctcggctgtctggataaggccaccagcggcacctatcgcgtcgccggtcaggatgttgccacgctggacgccgatgcgctggcgcaactgcgccgcgagcatttcggctttattttccagcgttaccatttgcttagccatttaaccgccgagcagaacgttgaagtacccgccgtctatgctggtcttgagcggaaacagcgactgcttcgtgcccaggagttgctgcaacggctggggctggaagaccgtacagagtattatccggcacagcttagcggtggtcagcaacagcgcgtcagcatcgcgcgggcattgatgaacggtggtcaggtaattcttgccgatgaaccaaccggcgcactggacagccattctggcgaagaggtgatggcgatcctgcatcagctgcgcgatcgtgggcatacggtgattatcgtcacccacgatccgcaggtcgctgctcaggccgagcgggtgatcgaaattcgcgacggcgaaattgtgcgcaatcctcccgccattgaaaaagtgaatgttactggcgggacggaacctgttgtcaacacggtgtctggctggcggcagtttgtcagcggttttaacgaggcgctgacgatggcatggcgggcgctggcagcgaataaaatgcgtactttactgaccatgctggggattattatcggtattgcgagcgtggtttccattgtcgtggtgggtgacgccgccaaacaaatggtgctggcggatattcgttctattggtacgaatactattgatgtctatcccgggaaagattttggcgatgacgatccgcaatatcagcaggcgctgaagtacgacgacttaatcgccatccaaaaacaaccgtgggtcgccagtgccacacctgccgtcagccaaaacctgcgcctgcgttataacaatgttgatgttgctgccagtgccaatggcgtgagcggcgattattttaatgtctatggcatgaccttcagtgaaggaaacacctttaatcaggagcagctgaacggtcgtgcgcaggtcgtggttctcgacagtaatactcgccgccagcttttcccccataaagcagatgtggttggcgaggtgattctggtcggcaatatgcccgccagagtcattggtgtggcggaagaaaaacagagcatgtttggtagcagtaaagtgctgcgtgtctggctaccttacagcacgatgtccgggcgagttatgggccagagctggcttaactccattactgtcagggtgaaagaaggatttgacagcgccgaggcggaacagcaactcacgcgtttacttagtctgcgccacggaaagaaggatttctttacctggaacatggacggcgtcttgaaaactgttgaaaagaccacacgtactttacaactgtttctgacgctggtggcggtgattagcctggtggtgggcggtattggtgtaatgaatattatgctggtgagtgtgaccgagcggacgcgggaaattggcattcgcatggctgtaggtgcgcgagcaagcgatgttttgcaacagttcctgatcgaagccgtactggtttgcctggtcggtggcgcgttgggaataacactgagtctgttaattgctttcaccttgcagcttttcttacccggctgggagattggttttagtccgttggcgctgctgctggcgtttctctgcagcacggtcaccgggattttatttggctggttacccgcacgaaatgcggcacgactggatccagtagatgctctggcacgagagtaatttttgagataaaaatgccagccgatcgggctggcattttgcctttaggatgtacacaatgagacagaagagttatgcgactgccgcttctacttcgacgggcacaataacactggcgtgattgccttttggcccctggtggacatcaaactgaacggattgtccagcttttagcgttctgtaaccatccatctgaatggtggaataatgagcgaaaatatcttcgccgccgccttcagggcagatgaaaccaaaccctttggcattgttgaaccacttaacagtacccttttccatgcttcgacatccttcgcaaatcttatacaagtaagatggaataaaccggggtcagagagggggctgttcaaaacctcgccaactctagaaatacaatttagagaattagggcgagccgtcaagcatttgacaggggacaaggggcaggtatgaatcaaaaatttgaagcagttaacgctattgacaggaatgtgacagatgtcgctgatgccaacgatagatgatagttatctatcatgtggagtagattggtcaggcaaataagctcttgtcagcggcagggcgttctgccgataaccgtaaccgaagatgataactgacaatgggtaaaacgaacgactggctggactttgatcaactggcggaagaaaaagttcgcgacgcgctaaaaccgccatctatgtataaagtgatattagtcaatgatgattacactccgatggagtttgttattgacgtgttacaaaaattcttttcttatgatgtagaacgtgcaacgcaattgatgctcgctgttcactaccaggggaaggccatttgcggagtctttaccgccgaggttgcagaaaccaaagtggcgatggtgaacaagtacgcgagggagaatgagcatccattgctgtgtacgctagaaaaagcctgaatgcaggcataaaaattgggggaggtgcctatgctcaatcaagaactggaactcagtttaaatatggctttcgccagagcgcgcgagcaccgtcatgagtttatgaccgtcgagcacttgttactggcgctgctcagtaacccatctgcccgggaggcgctggaagcgtgttctgtggatttggttgcgctccgtcaggaactggaagcctttattgaacaaaccacacccgttctgcctgccagtgaagaggagcgcgacacacagccgacgctgagttttcagcgtgtactgcaacgtgcggtcttccatgtccagtcctccggtcgcaatgaggttaccggtgcaaacgttctggtcgctatctttagcgaacaggagagccaggcggcatatctgttgcgtaaacatgaagtcagccgtctcgatgtggtgaactttatctctcatggcacgcgtaaagacgagccgacacagtcttctgatcctggcagccagccaaacagcgaagaacaagctggtggggaggaacgtatggagaatttcacgacgaacctgaatcagcttgcgcgcgtgggcggaatcgacccactgattggtcgtgagaaggagctggagcgtgctattcaggttctctgccgtcgccgtaaaaacaacccgctgctggtgggggaatctggtgtcggtaaaaccgcgattgcggaaggtcttgcctggcgaattgttcagggcgatgtgccggaagtgatggctgactgtacgatttactctctcgatatcggttctctgttagcgggcacaaaatatcgcggcgactttgaaaaacgttttaaagcgttgctcaagcagctggagcaggacactaacagcatcctgtttattgatgagatccacaccattatcggtgcgggtgcagcgtctggtggtcaggtcgatgcggctaacctaatcaaaccgttgctctccagcggtaaaattcgtgtaattggtagcacaacctatcaggagttcagcaacattttcgagaaagaccgtgctctggcgcgtcgcttccagaaaattgatattactgaaccgagcatcgaagaaactgttcaaatcatcaatggcctgaaaccgaagtatgaagcgcaccacgacgtgcgttataccgcaaaagcggtgcgtgcggcggtagagctggcggtgaaatacattaacgatcgtcatctgccggataaagccattgatgttatcgacgaagcgggcgctcgcgcacgcctgatgccggtaagcaaacgcaagaaaaccgttaatgtggcggatattgagtccgtggtggcccgtattgcacgcattccagagaagagtgtttctcagagtgatcgtgataccctgaaaaacctcggcgatcgcttgaaaatgctggtcttcggtcaggataaagccattgaggcgctgactgaagccattaagatggcgcgtgcaggtttaggtcacgaacataaaccggttggtagcttcctgtttgccggccctaccggggtcgggaaaacagaggtgacggtacagcttagcaaagctttgggcattgagcttctgcgctttgatatgtccgagtatatggaacgccataccgtcagccgtcttattggtgcgcctccgggatacgttggttttgatcagggcggtttgctgactgatgcggtcatcaagcatccacatgcggtgctgctgctggacgaaatcgagaaagcgcacccggacgtgttcaatattctgttgcaggtgatggataacggtacgctgaccgataacaacggacgcaaagcagacttccgtaacgtggtgctggtgatgaccaccaacgccggggtacgggaaactgagcgcaaatccattggtcttatccaccaggataacagcaccgatgcgatggaagagatcaagaagatctttacaccggaattccgtaaccgtctcgacaacattatctggtttgatcatctgagtaccgacgtgatccatcaggtggtggataaattcatcgtcgagttgcaggttcagctggatcagaaaggtgtttctctggaagtgagccaggaagcgcgtaactggctggccgagaaaggttacgaccgggcaatgggcgctcgtccgatggcgcgtgtcatccaggacaacctgaaaaaaccgctcgccaacgaactgctgtttggtagcctggtggacggcggtcaggtcaccgtcgcgctggataaagagaaaaatgagctgacttacggattccagagtgcacaaaagcacaaggcggaagcagcgcattaatctgattgttaggtaggttggtcaagtccgtaatctcgaaagaggttacggactttttgtttatggggtggaggaggttcagaccctttttttaatgatgatggtaagttgttgataattagtgctgcgggaaggtaaggataaaaaagggtgctgcaggagaatgggatggttttgctttattaacaacgggctaaacgtgtagtatttgagttcactgccgtacaggcagcttagaaattcacaggtaacatactccacccgcccaccatgttcactgccgtacagacagataaaatgcgaaaaaaaagctcgcactttcgtacgagctcttctttaaatatggcggtgagggggggattcgaacccccgatacgttgccgtatacacactttccaggcgtgctccttcagccactcggacacctcaccaaattgttttgctaccaaacctcatgggtggcaacggggcgctactatagggagttggagtaaaacggtcaagaagaattttaatgataattattgtttgctcatactgtaaacaagttgtgcagtatatctacatcgagacaagttacggacttatacttccaaagtacttcatacatatcacaaaataaaaaggccggttaaaccgaccttttactcgttctttctcttcgcccatcaggcggtaaaacaatcagcgactacggaagacaatgcggcctttgctcaggtcgtacggggtcagttcaacagtcactttgtcgcccgtcaggatgcggatgtagtttttgcgcattttaccggagatgtgtgcagtaaccacgtgaccgttttctaactctacgcggaacatggtattaggcaacgtttcaagaacggtaccttgcatttcaatattgtcttctttggccatctaatcctctggggtatcactaccgtaatttgaaccggcaagataatgccgaagttctgtaaataagtaaagatttgcgcgctaaatcgcaacaaacaggttcggcacattactccgaaaacacacggctaagccgcaccaaaagcgcaacgtataagggagcggtgagataaacgatgggcgttacctgacgcgaaaaattccttatcggcagcggggtaatgagcgtaaccaactctgcgaccgcaattataacactctggggagaaatgtgccgaaaacattcattcttgtggactaaacaagcatcgtggtacccagaaattattcggcaatcgtccgaggcgcatttgattgagataattaaggtaatcccggcggggaatttcgcaggcaccaaggcttgctgtgtgatcgttaaggacctggcagtcgataagcttaccgccatgaccgataaattcctcacagaataccagaagcgccgttttagacgcattttccatccggctgaacatggactcgccacaaaatagcgttccctgggccacgccgtacataccgccgacaagctcatcttcacgccagacttcaatggagtgggcatggccgagttcgtgaaggcgatggtaggcttcgaccacgccacgcgtgatccaggttccttcttcgcgatcgctggcacagccttcaatgacctgaccaaaagcgtaattcatcgtgacacgataggggctgcgtttatgaaatcgcttcatactacggctgatatgcagactttctggccatagcaccgcgcggggatcggggctccaccagaggatggggtcgcctggagaaaaccacggaaaaataccacgctggtaagccattaacaggcgcgcagggctaagatcgcccccaagtgccagcaggccgttaggctcacgtaatgcgccttccggggaagggaaggctatactatggcgagaaagctgaaccaggcgcatgaccgcaaaactccacgcaagtcggatcgttcaataatagcttacaaaccctgcttgaactggtaataacgcccctgtctggcaagcagttctgcgtgagtaccttgctcaataatttgcccgttgtccatcactattatttgttggaaacgagagagtccgcgaagtcgatgggtgaccattaacaccgttttctcacgcatcatttctgcaagcaattcaaggatctggctttcggttgtggcatctaagccttcggtaggttcatccagcaacaccagtggcgcatcatgtaacagcgcacgggcgatagccagacggcgcagttcaccaccggagagctggcgtccgccttcacctaaccaactgttgagacctgcatcctcgagcagcttttccaggccaacgcgacgcaagatctcgctcagagcctcatcactactgccagggctggcgagtaaaagattatcacgcagcgtggcgctaaacagatgcactcgctgaggaacaacgctgatggtctgtcgtagagccgcttcattcaggctggctatggggctatcgttaagcaaaatctcgccctgttgcgggtcccatgcgcgggtcagctgttgtaacagtgtacttttgccgcatccggttcgcccgagaatcgctatatgttccccggcgtttacctgaagagaaatccctttaagtgcctgttgagattgctccggataagtgaactgaacatcccgtaacgtcaggctaacgcgatcggcaacacgagtttgggtatcaggaaaggtgacctccggtttttgatccgttaagtcagagatacgtacggcagaggcaatgacttgccccagatgctgaaatgcacccgttactggtgccagtgcttcaaacgcggctaacgcgcagaagacaaacagggcaattaacgcgccgggttgagcattgccgccaacgccgccagacgccatccacagcatcaggatcaccgctaacgcgccaatgagcagcattatcgcttggctcaatgcggtcagttcagattgacggcgttgcgcttccagccattgaatttctgtattctctagttgcgtgcgataacgatcgctggcaccaaaaatggtcagctcagcttgcccttgcagccaggccgtcagttgttggcgatactgtccgcgaagatgagtcagattttgcccggtgctttttcccgcacgataaaacagcggtggcatcaggaaaagcgtcagtaacataatgccgcccagcgtaaaggcgagggtgaaatcaaggaaacttaacccgattgtcaccaccataatcaccacaaaagcgcccaccagcgggctgataacgcgcaggtaaagatgatcgagcgtatcaacatccgccaccacgcgattgagcaattcgccctgacgatagcgcgccagtccggcaggggagaggggcagcaatttgctgaaggtgtaaatgcgcagatgctgcaacacgcggaaagtcgcgtcgtgacttaccagacgttcaaaatagcgcccggcagtacgggtgattgctgcgccacgcacgcccgcagcgggtagcatatagttgaagctgtacagtccggcaacccccgcaaccgcactggcgctgaggaaccagccggaaagtgtcaacagaccgatactggcgagcagcgtcacaattgccagcacaataccaagacttaacatccatttatgacgtttatacagtgccagatagggtagcaaagcgcgcatttaaatctcctcctgacgatgggccagtaatgtggcgaatgggccaccagccacacttaattccgcgtaacgtccttgctcaataatccggccatcctgcataacccaaatgacatcccagtcagcaagatcttctaactggtgggtgaccattaacgttgtctggcgcagagaggcggcattcagcgcctccattacgcgctgttcactgtgagcatcaaggctggcagcgggttcatccaacagtaataggctacagggatttagtaacgcacgggccaccgccacgcgctgcgcctgccccacggaaaggcgggcagcctggtcgccaacaggcgtatcaacgccttgtgggaggagcggtagaaactcgctgacccaggcgttatccagcgctgcttgtaattcttgttcgctggcatcaggtcgcgccagtagtacgttatcccgcaatgttgctgccggtaattgtgggttttgcccaacccaggagagatgtttacgccaactttctggacttaaatcgcgtaattctatcccgttgattcgtaggcttccctgataactgagaaaaccagaaagcgcgttcagcagactgcttttaccactaccgctgcgaccaaccaacaccgcacgttggcctgctggcaaagtaaagttcagcggtccggccagcgttttaccttccgggctcgtgataaacagctcctcggcctcaatggtcaccggatcggtgcttgctaattccgcctcaccacgttgcggatgggcgagcggggtttccataaacgttttcagactgtcagctgcgccaacagcctgggctttagcatgataaaacgtaccgagatcgcgtaatggctggaaaaactctggcgcaaggatcagggccagaaaacccgcagccagcgtcacaccggtatcgtagtgaccaaaatccagctcgccgagataggaaaaaccaaagtagaccgccaccagagcaatactcaggctggtaaaaaattcgagaatgccggaggataaaaacgccagccgtagcacttccattgtccgttggcggaaatcttcgctagcagaacgaatactttcaatttcagcttcaccacgaccaaaaatacgcaatgtttccatgccgcgcaggcgatcgaggaaatgcccacttaagcgagcaagagcgagaaagttacgtcggttagcatcggcagcccccattccaaccagcgccataaacaacggaattaacggtgcagtgcccagcagaatgagcgccgcagcccagttagaggggaagattgccaccacaatcagcaacggcacgctcactgccagcgccatttgcggcagatagcgtgcatagtaatcatgcatatcgtcaatttgctcgagtaccagcgtcgcccagctccccgcaggtttaccctgaatccacgctggccctgcttgttgcagacggtcgagaacctgacggcggatggcaaagcggatatgctgcccggcgtgataacccacccgttcgcgtaaccagaccacccatgcgcgcagtacaaaggtcagaaccagtaacgtaaagggaagcagcagggcttcacggggaatattctccataatcatatgttgcagaattcgcgccatgaaccaggcctgggcaatgatcaatatgccgctcacaaagcccagcagacgagaaatattcagccaacgttgggagatgacgctttgctgttttaaccagcgggttaactctttttgacgagatttattcattgcacgcttagcaggtgagttatcagaattatttgcagagcaatgttacaacggggaaaaaataaaggcgacccatagtcgcatggtgtcgccttctttacttttgttactgatttgtaaaattattttgcgtcagctaaaccatcgaggtagcgttccgcatcaagtgctgccatgcagcctgtaccggcgctagtaatggcctggcgataaatgtgatccatcacgtcgcctgcggcaaagacgccaggaatgctggtctgggtggcattaccatgaataccgctctgtactttgatgtagccgttttccagttccagctgcccttcgaaaatcgcagtattcgggctgtgaccgatagcaacaaacagaccggcaacgtcgagactctcgatgttatcgctgttttgcgtatcgcgcagacgaacgccagtgacacccatttgatcgccggtcacttcttccagcgtacggttggtgtgcagaatgatgttgccgttctccactttatccatcaggcgcttaatgaggattttttccgcgcggaaaccgtcacggcggtgaatcagatgcacttcgctagcgatgttagacagatacagcgcctcttcaaccgcggtattgccgccgccgatgaccgcaactttctggttgcgatagaagaaaccgtcgcaggttgcacaagcagaaaccccacggcctttaaaggcttcttcagagggcaggccgagatagcgtgcagaagctccggtggcaataatcagcgcgtcgcaagtgtattcgccgttatcgccattcagacggaacggacggttttgcagatccaccttgttgatatgatcaaaaatgatctcagtttcaaacttggtggcatgttcgtgcatgcgctccattaataacggaccggtcagatcgtttggatcgccaggccagttttccacttccgtggtggtggtcagttggccgcctttttccatgccggtaatcagcacaggttgcaggttggcgcgcgccgcgtagacagcagcggtgtatcccgccgggccactacccaggataagcagtttactgtgtttggtcgtgcccatgagatccccatagttgttggcagacaatgggcaggattgtagggaatttacagacgtaaaaaaagagtatgacgattttgttaacaatttgtgcaatcggcagcatcgataagcaggtcaaattctcccgtcattatcacctctgctacttaaatttcccgctttataagccgattaaatgatgaataaacgcccctgttaatgaatatctggcatgttgtactaaaaatcgatgttttgctttgacaatcccctggtgttttgcgaaaacattcgaggaagaaaaaaaacagtattcttatatgcgcataaccatgcatgtaaataccatgtttaccgtgctagtgaaatctacgtatggcgtggacagacgccattcgtgatgtcgatagctgccacaaggcaacggtcttctcaccgtagacccaggcattgcgcgccgtgaatcttcatgatttcggtctatcgtgacgggtagcgactctgaacagtgatgtttcagggtcagacaggagtagggaaggaatacagagagacaataataatggtagatagcaagaagcgccctggcaaagatctcgaccgtatcgatcgtaacattcttaatgagttgcaaaaggatgggcgtatttctaacgtcgagctttctaaacgtgtgggactttccccaacgccgtgccttgagcgtgtgcgtcggctggaaagacaagggtttattcagggctatacggcgctgcttaacccccattatctggatgcaagtcttctggtattcgttgagattactctgaatcgtggcgcaccggatgtgtttgaacaattcaataccgctgtacaaaaacttgaagaaattcaggagtgtcatttagtatccggtgatttcgactacctgttgaaaacacgcgtgccggatatgagtgcctaccgtaagttgctgggggaaaccctgctgcgtctgcctggcgtcaatgacacacggacatacgttgttatggaagaagtcaagcagagtaatcgtctggttattaagacgcgctaacacggaacaggtgcaaaatcggcgtattttgattacactcctgttaatccatacagcaacagtactggggtaacctggtactgttgtccgttttagcatcgggcaggaaaagcctgtaacctggagagcctttcttgagccaggaatacattgaagacaaagaagtcacattgacaaagttaagtagcggccgccgccttctggaggcgttgctgatccttattgtcctgtttgccgtctggttgatggctgccttactaagctttaaccctagcgaccccagctggagccaaacggcctggcatgaacctatccataatttaggtgggatgcccggtgcgtggttggcagatacgctgttctttatttttggcgtgatggcttacaccattcccgtcattattgtcggcggttgttggtttgcctggcgtcatcagtccagcgacgaatacattgattattttgccgttagcctacgcatcattggcgttttggcgctcatccttacctcctgtggtctggcggcaatcaacgctgacgatatctggtattttgcctccggtggcgtcattggcagcttactaagcactacgctacaaccactgctacacagtagcgggggaactattgcgctgctctgcgtttgggcagcgggcctgacgttgttcaccggttggagttgggtgaccattgctgaaaaactcggcggctggattttaaacattctcaccttcgccagtaatcgtacccgtcgcgatgatacctgggtcgatgaagatgagtatgaagacgacgaagagtatgaagatgaaaatcacggcaaacagcatgaaagtcgccgtgcccgtattcttcgcggcgcgctagcgcgtcgtaaacggttggcggaaaaattcattaatccgatggggcggcaaacagacgctgcgttgttctccggtaagcggatggatgatgacgaagagattacctacactgcacgcggtgtggctgccgacccggacgacgtcctatttagcggcaatcgtgcaacgcagccagaatatgacgaatacgatccattattaaacggtgcgccaattaccgaacctgtcgctgtagcagctgctgctaccacggcgacacaaagctgggctgcgccggttgaacctgtgactcagacgccgcctgttgcctctgttgatgttccacctgcgcaacctacagtagcctggcagcctgtaccgggtccacaaacgggagagccggttattgctcctgcaccggaaggttacccacagcagagtcaatatgcgcagcctgcagtgcaatataatgagccgctgcaacaaccagtacagccgcagcagccgtattatgcacctgcagctgaacaacctgcgcaacagccgtattatgcccctgcgccagaacaaccggtggcaggtaacgcctggcaagccgaagagcagcaatccacttttgctccacagtctacataccagactgagcaaacttatcagcagccagccgctcaggagccgttgtaccaacagccgcaacccgttgaacagcagcctgttgtggagcctgaacccgttgtagaagagacaaaacccgcgcgtccgccgctttactactttgaagaagttgaagagaagcgagcccgtgaacgtgaacaacttgcggcctggtatcaaccgattccagaaccggttaaagaaccagaaccgatcaaatctagcctgaaagcaccttctgttgcagcagtacctccagtagaagccgctgccgctgtttccccgctggcatctggcgtgaaaaaagcgacactggcgacgggggctgccgcaaccgttgccgcgccagtcttcagtctggcaaatagcggtggaccgcgtcctcaggtcaaagaggggattggtccgcagttgccacgaccgaaacgtatccgcgtgccaactcgtcgtgaactggcgtcttacggtattaagctgcccagtcagcgtgcggcggaagaaaaagcccgtgaagcccagcgcaatcagtacgattctggcgatcagtacaacgatgatgaaatcgatgcgatgcagcaggatgaactggcacgtcagttcgcccagacacagcagcaacgctatggcgaacagtatcaacatgatgtgcccgtaaacgcagaagatgcagatgctgcggcagaggctgaactggctcgtcagtttgcgcaaactcaacaacaacgttattccggcgaacaaccggctggggcgaatccgttcagcctggatgattttgaatttagcccaatgaaagcgttgctggatgatggtccacacgaaccgttgtttacgccaattgttgaacctgtacagcagccgcaacaaccggttgcaccgcagcagcaatatcagcagccgcaacaaccagttccgccgcagccgcagtatcagcagccacaacagccggttgcgccgcagccacaatatcagcagccgcaacaaccggttgcgccacagcagcaatatcagcagccgcaacaaccggttgcgccgcagcagcagtatcagcagccacaacagccagttgcgccacaaccgcaggataccctgcttcatccgctgttgatgcgtaatggcgacagccgtccgttgcataaaccgacgacgccgctgccttctctggatttgctgacaccgccgccgagcgaagtggagccggtagatacctttgcgcttgaacaaatggctcgcctggtggaagcgcgtctggctgatttccgtattaaagccgatgtcgtcaattactctccggggccggttatcactcgctttgaattgaacctggcaccgggcgtaaaagcggcgcgcatttctaacttgagtcgggaccttgcccgtagtcttagcacggtggcggtgcgtgtcgttgaagttattcctggcaaaccctatgtaggtctggagttaccgaataaaaaacgacaaaccgtttatctgcgcgaagttttggataacgccaaattccgcgataatccgagcccattaaccgtggtgctgggtaaagatatcgccggtgagccggtggttgccgatctggcgaaaatgccgcacttgttggttgcggggactaccggttccggtaaatctgtcggtgtgaacgcgatgatcctgagcatgctttataaagcacagccagaagatgtgcgtttcatcatgatcgacccgaaaatgctggagcttagcgtttatgaaggcattccgcatctgttaacggaagtcgttactgatatgaaagatgccgccaacgcgctgcgctggtgtgttaacgagatggagcgtcggtataaactgatgtctgcgctgggtgtgcgtaatctggcgggttataacgaaaaaattgctgaagccgatcgcatgatgcgtccgattccagacccgtactggaagccgggtgacagtatggatgcccagcatccggtgctgaaaaaagaaccatacattgtggtgttggttgacgaatttgccgacctgatgatgacggtaggtaaaaaagtggaagagctgatagcacgtctggcgcaaaaagcccgtgccgcgggtatccacctcgtactggcaactcagcgtccaagcgttgatgttattactggtctgattaaagcgaatattccgacccgtatcgcctttaccgtatccagtaagattgacagtcgtaccattcttgatcaggctggcgcggaaagtctgctgggtatgggggatatgctctactctgggccgaactccacgttgccggtacgtgtccatggtgcttttgttcgcgatcaggaagttcatgccgtggtgcaggactggaaagcgcgtggtcgcccacagtatgttgatggcatcacctccgacagcgaaagcgaaggtggtgcgggtggtttcgatggcgctgaagaactggatccgttgttcgatcaggcggtgcagtttgtcactgaaaaacgcaaagcgagtatttctggcgtacagcgtcagttccgcattggttataaccgtgcagcgcgtattatcgaacagatggaagcgcaggggattgtcagcgaacaggggcacaacggtaatcgtgaagtgctggccccaccgccgtttgactaactaatgcatcgtatgccggataaggcgcggtagcgtcgcatccggcactctatcaactgaaaattcagtattttcttctttcctcaagctgattattagcctggaatagagagtagagggaactcccgatcgggagtgacgtaatttgaggaataatgatgaaaaaaattgccatcacctgtgcattactcagtagcttagtagcaagcagcgtttgggctgatgccgcaagcgatctgaaaagccgcctggataaagtcagcagcttccacgccagcttcacacaaaaagtgactgacggtagcggcgcggcggtgcaggaaggtcagggcgatctgtgggtgaaacgtccaaacttattcaactggcatatgacacaacctgatgaaagcattctggtttctgacggtaaaacactgtggttctataacccgttcgttgagcaagctacggcaacctggctgaaagatgccaccggtaatacgccgtttatgctgattgcccgcaaccagtccagcgactggcagcagtacaatatcaaacagaatggcgatgactttgtcctgacgccgaaagccagcaatggcaatctgaagcagttcaccattaacgtgggacgtgatggcacaatccatcagtttagcgcggtggagcaggacgatcagcgcagcagttatcaactgaaatcccagcaaaatggggctgtggatgcagcgaaatttaccttcaccccgccgcaaggcgtcacggtagatgatcaacgtaagtaaaggcacctgagtgagcaatctgagcctcgattttagcgataatacttttcaacctctggccgcgcgtatgcggccagaaaatttagcacagtatatcggccagcaacatttgctggctgcggggaagccgttgccgcgcgctatcgaagccgggcatttacattctatgatcctctgggggccgccgggtaccggcaaaacaactctcgctgaagtgattgcccgctatgcgaacgctgatgtggaacgtatttctgccgtcacctctggcgtgaaagagattcgcgaggcgatcgagcgcgcccggcaaaaccgcaatgcaggtcgccgcactattctttttgttgacgaagttcaccgtttcaacaaaagccagcaggatgcatttctgccacatattgaagacggcaccatcacttttattggcgcaaccactgaaaacccgagctttgagcttaatagcgcactgctttcccgtgcccgtgtctatctgttgaaatccctgagtacagaggatattgagcaagtactaactcaggcgatggaagacaaaacccgtggctatggtggtcaggatattgttctgccagatgaaacacgacgcgccattgctgaactggtgaatggcgacgcgcgccgggcgttaaatacgctggaaatgatggcggatatggccgaagtcgatgatagcggtaagcgggtcctgaagcctgaattactgaccgaaatcgccggtgaacgtagcgcccgctttgataacaaaggcgatcgcttttacgatctgatttccgcactgcataagagcgtacgtggtagcgcacccgatgcggcgctgtactggtatgcgcgaattattaccgctggtggcgatccgttatatgtcgcgcgtcgctgtctggcgattgcgtctgaagacgtcggtaatgccgatccacgggcgatgcaggtggcaattgcggcctgggattgctttactcgcgttggcccggcggaaggtgaacgcgccattgctcaggcgattgtttacctggcctgcgcgccaaaaagcaacgctgtctacactgcgtttaaagccgcgctggccgatgctcgcgaacgcccggattatgacgtgccggttcatttgcgtaatgcgccgacgaaattaatgaaggaaatgggctacgggcaggaatatcgttacgctcatgatgaagcaaacgcttatgctgccggtgaggtttacttcccgccggaaatagcacaaacacgctattatttcccgacaaacaggggccttgaaggcaagattggcgaaaagctcgcctggctggctgaacaggatcaaaatagccccataaaacgctaccgttaatgttatcgttgcggtaatgttgttactgtatccctgtggtcgcaggctgtggccacatctcccatttaattcgataagcacaggataagcatgctcgatcccaatctgctgcgtaatgagccagacgcagtcgctgaaaaactggcacgccggggctttaagctggatgtagataagctgggcgctcttgaagagcgtcgtaaagtattgcaggtcaaaacggaaaacctgcaagcggagcgtaactcccgaagcaaatccattggccaggcgaaagcgcgcggggaagatatcgagcctttacgtctggaagtgaacaaactgggcgaagagctggatgcagcaaaagccgagctggatgctttacaggctgaaattcgcgatatcgcgctgaccatccctaacctgcctgcagatgaagtgccggtaggtaaagacgaaaatgacaacgttgaagtcagccgctggggtaccccgcgtgagtttgactttgaagttcgtgaccacgtgacgctgggtgaaatgcactctggcctcgactttgcagctgcagttaagctgactggttcccgctttgtggtaatgaaagggcagattgctcgcatgcaccgcgcactgagccagtttatgctggatctgcataccgaacagcatggctacagtgagaactatgttccgtacctggttaaccaggacacgctgtacggtacgggtcaactgccgaaatttgctggcgatctgttccatactcgtccgctggaagaagaagcagacaccagtaactatgcgctgatcccaacggcagaagttccgctgactaacctggtgcgcggtgaaatcatcgatgaagatgatctgccaattaagatgaccgcccacaccccatgcttccgttctgaagccggtagttatggtcgtgacacccgtggtctgatccgtatgcaccagttcgacaaagttgaaatggtgcagatcgtgcgcccagaagacagtatggcggcgctggaagagatgactggtcatgcagaaaaagtcctgcagttgctgggcctgccgtaccgtaaaatcatcctttgcactggcgacatgggctttggcgcttgcaaaacttacgacctggaagtatggatcccggcacagaacacctaccgtgagatctcttcctgctccaacgtttgggatttccaggcacgtcgtatgcaggcacgttgccgcagcaagagcgacaagaaaacccgtctggttcataccctgaacggttctggtctggctgttggtcgtacgctggttgcagtaatggaaaactatcagcaggctgatggtcgtattgaagtaccagaagttctgcgtccgtatatgaacggactggaatatattggctaatacccaatttttctgaatctaaaaagcgcctgcgggcgctttttttgtctccctttgataccgaacaataattactcctcacttacacgtaatactactttcgagtgaaaatctacctatctctttgattttcaaattattcgatgtatacaagcctatatagcgaactgctatagaaataattacacaatacggtttgttactggaatcaatcgtgagcaagcttgagtgagccattatgaaaacgaaaatccctgatgcggtattggctgctgaggtgagtcgccgtggtttggtaaaaacgacagcgatcggcggcctggcaatggccagcagcgcattaacattaccttttagtcggattgcgcacgctgtcgatagcgccattccaacaaaaagtgacgaaaaggttatctggagcgcctgtacagttaactgtggtagtcgctgcccgctacgtatgcacgtcgtggacggtgaaatcaaatatgtcgaaacggacaataccggcgatgacaattacgacggcctgcaccaggttcgcgcctgcctgcgtgggcgttccatgcgtcgccgtgtctacaatccggaccgcctgaaatatccgatgaaacgagtcggggcgcgcggtgaaggcaaattcgagcgcattagctgggaagaagcctacgacatcatcgcgaccaatatgcagcgcctgatcaaagagtacggcaacgagtctatctatctgaactatggcaccggtacgctgggcggcaccatgacccgctcctggccgccgggaaataccctggtcgcgcggctgatgaactgctgcggcggctatctgaaccattacggcgactactcctccgcgcaaattgcggaaggtttgaactatacctacggcggctgggcagatggcaacagcccgagcgatatcgaaaacagtaagctggtagtgctgtttggtaataaccctggcgaaacgcgaatgagtggcggtggggtgacttactatcttgaacaggcacgccagaaatctaatgcccgcatgatcatcatcgatccgcgctataccgacaccggtgccgggcgcgaagatgagtggatccctattcgtccgggaacagatgccgcactggttaacggtctggcgtacgtcatgatcactgaaaacctggtggatcaggcattcctcgataaatattgcgttggctacgatgagaaaaccctgccagccagtgcgccgaaaaatggccactataaagcttatattctgggtgaagggccagatggcgtggctaaaacgccggaatgggccagccaaatcactggtgttccggcagacaaaatcatcaaattggctcgtgaaatcggtagtaccaaaccggcgtttatcagccagggatggggcccgcagcgtcacgctaacggtgaaatcgcaacccgtgctatcagcatgctggcgattctgaccggtaacgttggtattaacggaggcaacagcggcgcgcgtgaaggtagttacagcttaccgtttgtccgtatgccgaccttggaaaacccgatccagaccagcattagcatgtttatgtggaccgatgccattgaacgtggcccggaaatgacggcgctgcgtgatggtgtacgcgggaaagataagctggatgtgccgatcaaaatgatctggaactatgccggtaactgcctgattaaccagcattctgaaatcaaccgtacccatgaaatccttcaggatgataagaagtgcgagctgattgtggttatcgactgccacatgaccagtagcgcgaaatatgctgacatcctgctgcctgactgcaccgcttccgaacagatggactttgcgctggatgcatcctgcgggaatatgtcttacgtgattttcaacgatcaggtgattaaaccgcgctttgaatgtaagaccatctatgaaatgaccagcgaactggcaaaacgtcttggcgttgagcaacagtttactgaaggccgtacccaggaagagtggatgcggcatctgtatgcccagagccgggaagcgattcctgaactgccaacgtttgaagagttccgcaagcaggggatctttaaaaagcgcgacccacaagggcatcacgttgcttataaagccttccgtgaagatccgcaggcaaacccactgactacgccaagcggcaaaattgagatttatagccaggcgctggctgacattgccgctacctgggaattgcctgaaggcgatgtgatcgatccactgccgatctacacgccgggctttgaaagttatcaggatccgctgaacaaacagtatccgctgcagcttacaggtttccactataaatctcgcgttcacagtacttacggcaacgttgatgtgctgaaagcggcttgccgtcaggaaatgtggatcaacccgcttgatgcccaaaaacgcggtatccacaacggcgataaagtcaggatctttaacgatcgtggtgaggttcatattgaggcgaaagtgacgccacgaatgatgccgggtgtggtcgcactgggtgaaggtgcctggtatgacccggatgcaaaacgtgtcgataagggtggttgtattaacgtactgaccactcaacgtccgtctcctctcgctaaggggaatccgagtcatacaaaccttgttcaggttgaaaaggtgtaaggagtaaccgatgacaacccagtatggattttttattgattccagccgttgcaccggttgcaaaacctgcgagctggcctgtaaagactacaaagatttgacgccagaagtcagcttccgccgcatttatgaatatgctggcggcgactggcaggaagataacggtgtctggcaccagaacgtgtttgcctactatctgagcattagttgtaaccactgcgaagatccggcttgtactaaagtctgcccgagcggtgcgatgcataaacgtgaagatggttttgttgtggtcgatgaagatgtgtgcattggctgccgctactgccatatggcttgcccgtatggcgcaccgcaatataacgaaacgaaaggccatatgaccaaatgcgatggttgttatgaccgtgttgcggagggtaaaaagccgatctgtgttgaatcttgtccgctgcgggcgctggatttcggccctatcgacgagctgcgtaaaaaacatggcgatctggcggccgttgcgccgttgccgcgagctcactttaccaaaccgaatattgtgatcaaacccaatgccaatagccgcccgaccggggataccactggctatctggcaaacccgaaggaggtgtgagatgggaagtggatggcatgaatggccgctgatgatcttcacggtcttcgggcaatgtgtagcaggtggttttatcgttctggctttggcgctgctcaaaggcgacctgcgagcagaagcccagcagcgtgttatcgcctgcatgtttggtttatgggtgctgatgggcattggctttatcgcctctatgctccatcttggtagtccaatgcgcgcttttaacagcctcaaccgggtaggggctagtgcactcagtaacgaaatcgccagcggtagcatcttttttgccgtaggcggcatcggctggttgctggcaatgctgaaaaagctgagtccggcattgcgtacgctgtggctgatagtgacgatggttcttggcgtcatctttgtctggatgatggtgcgtgtgtataacagcattgataccgttccgacctggtacagcatctggacgccgatgggcttcttcctgacgatgtttatgggcggcccgttactgggttacctgttgttgagtctggctggcgtcgatggctgggcgatgcgtctgctgccagcaatttctgtactggcactggtagtgagtggcgtggtgagtgtgatgcagggcgcagagctggcgactattcatagttctgtgcagcaggccgcagcgctggtgccggactatggtgcgctgatgtcctggcggatcgtgcttttggccgttgccctgtgcttgtggattgcaccacagctaaaaggttatcagcctgcggttccgctactttctgtaagtttcattctgcttctggcaggggaattaatcggtcgcggcgtattctatggtttgcatatgaccgtggggatggccgtcgcaagctaatcataacaaccggggtttcggccccggttctcttttatttctgcttcgttaacgtgtcataactggtcatcaaattacgataatcaggaatgtggttagagaacaacgtcgccagtccttcaatatcattacgccagtcgcgatgcagctcgcacgccacgccgaaccatgtcatcaattgcgcaccagcttggctcaagcgatcccatgcgctatgccgggtaatttcattaaaggtcccactcgcgtcagtcacgacaaagacgtcaaacccttcttcaatggcactaagcgccgggaatgccacgcaaacttcggttaccacaccggcaataattaactgttttttacctgtcgctttgacagcttttacaaaatcttcgttatcccaggcgttaatatttcccgggcgagcaatgtaaggtgtatcggggaattgtgctttcagttctggaactaatgggccgttaggaccggtttcaaaactggtggtaagaatagttggtaagttgaaatacttagccaggtcacccagcgccagcacgttatttttaaacttatcgggttcgatatcccgtacaagggaaagtaaaccagcctggtgatcaacaagcaaaacggcagcatcatttttatcaagacgaacatacggtttggtcatcctcttctcctttcgagagtcagtggtacgtctgaaatcgatcagacgcgatgcattgctctgaaagcatagacgggaaatatgagtttgctgtgaccatgaaatttttcgactgaacgaagcgtatgaaatttgtgttagttcaataaaaacaatcagatgagactaatcatctcttcagcattagcgttatgaatgagtaatataaatcgataataccgccgctgggatatcgcgtattttcacccattgacaatgtttttggcggtggcatgatgcgcatgaaatttgaacttcctcacggttttaattcatgtccacgtatacccagcctgtcatgcttttgctgtctggcctgcttttgttgactctggcgattgcggtgttaaatacactcgtgccgctttggctcgcccaggaacacatgtccacatggcaggtaggcgttgtcagcagttcctattttaccggcaaccttgtcggtacattgctgacagggtatgtcattaagcgcattggctttaaccgcagctattatctggcctccttcatttttgccgctggctgtgccggccttggcctgatgattggattctggagctggttggcttggcgttttgtcgcgggcgtcggctgtgccatgatttgggtggttgttgagagcgcgctgatgtgcagtgggacgagtcgtaaccgtgggcgtttgcttgctgcgtatatgatggtttattacgtgggaacgtttttaggccagttactggtcagcaaagttagtaccgagctgatgtccgtattgccgtgggttacaggtttgacgttggcagggatcttaccgctgttgtttacgcgtgtgctgaatcagcaggctgaaaaccatgatagcacgagtattacgagtatgctaaaactccgtcaggcgcggcttggcgtgaatggctgcattatcagtggaatcgttctgggatctctatatggcctgatgccgctgtacctcaatcacaaaggggtgagcaatgccagcattggtttctggatggcggtactggtcagtgcgggtatccttggacaatggccgattggacgtctggcggataagtttggtcgactgctggtgttgcgtgttcaggtctttgtcgtcattctcggcagtatcgcgatgcttagccaggcggcgatggccccagcgttattcatcctcggtgccgctggctttacgctatatccggtggcgatggcatgggcttgcgagaaagttgaacatcatcaactggtggcgatgaaccaggccttactgttgagctatactgtgggaagtctgcttggcccgagttttaccgctatgctaatgcagaatttctccgataatttattgtttatcatgatcgccagcgtaagctttatctatttgctgatgctgctgcgcaacgccggtcatacgccgaaacccgttgctcacgtgtaaatgaattcaagcagagtgtgaacttactgtttcacactctgcttttttgtttcttctatctgacttgctttattccaaattttattcgtttaaaaataaaatgtgcagcaggttataattttgcatttcgctatttccgcacttcttatttgccgcgcataatccctcgttttaccgatgcccctttaattttggcgaaggatttgtctatggctgggaatgttcaggaaaaacagttgcgatggtacaacattgcgctgatgtcttttatcactgtctggggttttggcaacgttgttaataactatgccaaccaggggctggtggttgtttttagttgggtgtttatctttgcactctatttcacaccttatgcgctaattgttggtcagttaggcagcaccttcaaagatgggaagggcggggtcagtacctggattaaacacacgatgggacccggactggcttatctcgccgcgtggacctactgggtggtgcatattccctatctggcacaaaaaccccaggcaattctgattgcgctcggttgggcgatgaaaggcgacggtagcctaatcaaagaatatagtgtcgtagcgttacaggggttaacgctggtgctgtttatcttctttatgtgggttgctagtcgcggtatgaaaagcctgaaaatcgtcggttctgtggcagggattgctatgtttgttatgagtctcctgtatgtggcgatggcggtaaccgcgcctgcaattactgaagtgcatattgcgaccacaaacattacctgggaaacgttcattcctcatatcgactttacctacattaccactattagtatgctggttttcgcggttggcggagcagagaagatttctccttacgttaatcaaacgcgcaacccaggaaaagaatttccaaaagggatgttatgcctggcggtgatggttgcggtttgtgccattctgggcagcctggcgatggggatgatgtttgatagccgtaatatcccggatgacttaatgaccaacggtcagtattacgcctttcagaagctgggcgagtattacaacatgggtaatactttaatggtgatttacgccattgcgaataccctgggacaagtagcggcgctggtattcagcattgatgccccgcttaaagtgctattaggtgatgctgacagcaaatatattccagccagtttatgtcgtaccaacgcttctggtacgcccgttaatggctattttctgaccctggtactggtggcgattctgattatgctgccgactctcggcattggtgatatgaacaatctctataaatggctgttgaaccttaatagcgtagtgatgccgctgcgttatttatgggtatttgttgcatttattgcagtcgttcgcttggcgcagaaatataaaccagaatatgtctttattcgtaataagcctctggcaatgaccgtcgggatttggtgttttgcctttaccgcctttgcctgtttgacggggatcttcccgaaaatggaagccttcactgcagagtggaccttccagttggcgctgaatgttgcaacgccgtttgtgctggtaggattaggactgatattcccgctgctggcgcgtaaagcgaatagtaaataattattgtggtcggtgacgctgactctggcagatctgacccgtttttacataatcgagaaatgcgcgcaagccgcaggacatatactggcggtttggataatagatctggaagcctggacgctctgtgctccagtcttccagtacacattctaaacgaccagtatcaaggtactccttgatctgttcatagagcagatacccgataccagcacccatcaaaacggcctccagttcagcatcaacatcatccagaatgatatttcctgcgacagcaatttccagctcctttgcaaattgccagtggaaaggtttgccgctgggataacgaaaaacaacacattgatgattaagcagatcatgaggatggcggggtttgccatatcttgcaaagtactctggcgttgctgctacacataatttcactggcgggccgatcgccacgctgatcatatctttttcgacgatgcaactaagtcgaacgccagcgtcaaagccctgttggacgatatcgacaagagagtcgtcagttgtgagctcgactttaatatcaggatattcacgtgtgaaaccaaccagtaaagacattaaaaatatacgtgcagctacccgggcggcattgattttgagcgttcctgtcggtgtcagacgaaaatcattcatctcatctaacatgatctgaatttcgtcgaaagctgggcgcaatcgttcatagagattagaacccgcttccgttaagcttacgcttcgggttgtccgattgaataagcgaattttaagacgttgttccagtgttttaatactatggctaatggcggagctggataagcctaactcatcgcccgctgcacgaaagctttgattacgggccacggcaaagaaagtggcaaagtcagacatattcatccgcattagtgaaaatccttcattaactcatcctgaatcatcacgtttacaggattatgccgcctgcgtaaagtgcgctccagaacttaacgtggaggtaaaattatgcagtctgaacgtatttatttggtatgggcccatcctcgtcatgatagtttgaccgcacatattgctgatgcgatccatcagcgggcaatggagcggaaaatacaggtgacggaactcgatttatatcggcgtaatttcaacccagtgatgacgccggaagatgaaccagactggaagaatatggataaacgttattctccagaggttcatcagctttatagtgagctgcttgaacatgacacgttagtggtggtttttcctctctggtggtacagcttcccggcaatgctaaaaggatatattgacagagtatggaataatgggctggcttatggagatgggcacaaattaccattcaataaagttcgttgggtggcgctggttggaggagacaaagaaagttttgtccagatgggctgggaaaaaaatataagcgattatttaaaaaatatgtgcagttatcttggtattgaagatgccgatgtcactttcttgtgtaatacagtggtattcgatggggaagaacttcacgcgagctattatcagagcttattatctcaggtacgggatatggtagatgcactataagatgtgttaaaaacgctgtagcagaatgaagcgcggaataaaaaagcggcaactcaataaagttgccgctttacggggaaattagaacattaccttatgaccgtactgctcaagaatgcctttcacgcgttccatggtctctttcttcggtggtttaacaccgtcgagtttgtactcttcacccattgccacccatttgtgtttgcccagctcgtggtaggggagaagctcgattttctcaacgttgcccatatcacgggtaaattcaccgaggcgatgcgcactatcgtcatcgtcagaccagcctgggacaacaacgtagcggatccacaccttcacatttttgttcgccagatatttagcgaactccagcgtgcggtggttggaaactccaaccagattttggtggatctcgtcgttcatctgtttgagatcgagcattaccaggtcggttacttccagcagttcatcaatcaccggatcgtaacgacgaacaaaaccgttggtgtccagacaggtatgaatgccttcttttttgcaggcgcggaaccagtcacgaacaaactcagcttgcaggattgcttcaccgccggatgcggtaacgccgccgccggaagcgttcataaagtggcgataggtcaccacttccttcatcaaatcttcaacggtaacttctttaccgccatgcgtgtcccaggtgtcgcggttatgacaatacaggcagcgcatcaggcagccctggaaaaaggtgataaagcgaatacctgggccgtctacggttccacaggattcaaaggagtgaatgcgaccaataacactcattgcggtgtttctccagatgtggcccatctgaggccgtgttggtgcgcagctcgaaggctacgtcgagtctgttttggcagtcaccttaaagtatagatagctgacaaaaaaggctctcgcgctaaaaaaggccccactttcgtggagcctttattgtacgctttttactgtacgatttcagtcaaatctaattacatagattgagtgaaggtacgagtaataacgtcctgctgctgttctttagtcaggctgttgaaacgtactgcgtagccagatacacggatggtcagctgcggatatttttccgggttttccatcgcgtcgagcagcatttcacggttcatcacgttaacgttcaggtgctgaccaccttcgatggatgcttcgtggtggaagtaaccatccatcagaccagccaggttggtcttacgaacttcgtcgtctttacccagtgcgttcggaacgatagagaaggtgtaggagataccatctttagcgtaagcaaacggcagtttagcaacggaagtcagagaggctactgcacctttctggtcacgaccgtgcatcgggttagcacccggtccgaacggcgcgccagcacgacgaccgtctggggtgttacccgttttcttaccatacacaacgttagaagtgatggtcagaacagactgagtcgggatagcgtcacggtaggtgtgcagtttctgaattttcttcatgaaacgttctaccaggtcaacagccaggtcatctacacgcggatcattgttaccaaactgcgggtattcgccttcgatttcgaagtcgatagccagaccgtcttcgtcacgaatcggtttaactttcgcatatttgattgcagacagggagtcagcagcaacggacagaccagcgataccacacgccatggtgcggataacgtcacggtcgtgcagcgccatcagagaggcttcgtagctgtacttgtcgtgcatgtagtggatgatgttcagtgcagtgatgtactgtttagccagccagtccatgaagtgatccatgcgctccatcacttcatcatagttcaggacatcgcctttgatcggttcagacttcggaccaacctgcattttcagtttttcgtcaacgccgccgttgattgcgtacagcatggttttcgccaggtttgcacgcgcaccgaagaactgcatttgtttaccaacgatcatcgggcttacgcagcaagcaatagcgtagtcatcgttgttgaagtccggacgcatcaggtcatcgttctcatactgcagagaagaggtgtcgatggacactttagcggcgaatttcttgaagttcagcggcagtttttcagaccacagaatggtcatgttcggttccggagacggacccatggtgtacagggtgttcaggaaacggaagctgtttttggtaaccagggtacgaccgtcgaggcccataccaccgatagattcggttgcccagatcgggtcgccagagaacagttcatcgtattccggagtacgcaggaagcgaaccatacgcagtttcatgaccaggtggtcaaccatttcctgcgcttcttgttcggtgatcttgccagctttcaggtcacgttcgatgtacacatccaggaaggtggaggtacgaccgaaggacattgcagcaccgttctgagacttaacagcagccaggtagccgaagtaagtccactggatagcttcctgagcgttggtagccggaccagagatgtcgtagccgtatttcgcagccatttctttcatctgacccagagcgcggtgctgttcagcgatttcttcgcgcagacggatagtctgttccaggtttacgccgttttccagatcagcctgcagagaagtgaactgtgccagtttgtctttcatcaggtagtcgataccgtacagcgcaacgcgacggtagtcaccgatgatacggccacggccatatgcatctggcagaccggtcagaacaccagatttacggcaacgcaggatgtccggagtgtaaacgtcgaacacgccctggttgtgagttttacggtattcagtgaagatttttttgatcatcggatccagttcgcggttgtacgctttgcaggaaccttcgatcattttgataccaccgaacgggataagagcacgtttcagcggagcttcagtctgcagaccaacgattttctcaagctgcttgttgatgtagccagcgtcgtgagaggtgatggtggaagcaacagcggtgtcaaagtcaactggcgcgtgagtgcggttttccagtttaacgccttccattactttgtcccacagggtggtggtcgcttcagtagcgccagccaggaaggactcgtcaccctcgtacggagtgtagtttttctgaatgaagtcacggacgtttacttcattctgccagtcacctttggtaaaaccttcccaggctgtggctaacttttcattaagctcggacatgtaacacctaccttcttaagtggattttttatttactgcgtacttcgacaaccattaatggtggtcgttttcacgcaggtaaatgacccagtatgtcaacccaaccaacaaaccaccaccgataatgttgccgatcgtaaccggaatcaggttatcagtgatgaaattcatcacggtcaggtgagaaaaattttccggtgcagaaccgactgcggtccaaaattccggggatgcgaagtcgcggattacaatacccatcgggatcataaacatgtttgcgatactgtgctcaaaaccgctggcaacaaacatcgcgaccggcagcaccataatgaacgctttgtccatcaggctgcggccagaataactcatccatactgccagacataccatcaggtttgccaggataccaagacagacggcctcaataaaagtatggtgcactttgtggtcggcggtttgtaggacgtttagtccccattgaccatttgcggtcatatactcgccggaaagccacattaaaagtacaaacagcagtgcgccgaccaggttgccaaaatagacatttagccagtttttcgccaactgaccccaggtgatgcgcccactcgccttagcaacaacaatcaacacggtggaagtaaagagatcggctccgcagacaacacaaagaatcagccccagagagaagcaaatgccgccaaccagttttgccatgccgaagggcattgtgcctgtgccagtggttgctgtgatatagaagacgaatgcgatactgatgaaaacaccggcggtaatcgccagatagaaagtcttaagcggatgtttcgttgctttatagacacccgcctcttcggccactttggccattgcagcaggaagtaaaagatcaaaagggttgtcagctttcacactaactctctctttattaagtcggcgacgagatactaacaaagcattatagatgagaaattgatatagatcatatctcgcctggcttataggcccgtaactcgcatggtttttatgcaaatacggagtaaatatttgattatccaaataaaaataaattttaaaaattaacaaatgagttgaattttttccgcatcctccgctaaaacagttaattaaaagggagcatcaggcgaataaagtaacaatatcgatcgtatttattaaatacaaattaccgatatttaaccttataattacaattattttattaatgcaaatatatgtaaagcggggcattaaaaaaacgccccgtaatataactcagactaatcattaagcctacattgcgtaggctatttgattttattttgcccagaatgctgctttggcgcgctgcagcttttcgtaggccttcaacaagctctgatgtgcagcaaacgcgtgcagatcgctatctaccggttgcaggccgtaaaacgccgcttcgccgctcattgccgcactggcggcttctacggcatctgcgccgtacatgcgaacaaacgcattcagatattgcagcggctggcgatcttcttcctgtgccagtaataacaacgtttgcaggcagcgataatagttggcgcgttccggactaaatacactactgttaaactccatcgtccattcggtccagaccagagcctgttccagatcgccaccagccagcgccagcatggcttttaattcaccgatacgcagggtgtaccaaccgttatcgctcccggtcgccagacccaacagctcacgcacgcgggtaaagtcatcaaaaccttcttcatccagttgctcgatgaggttcaggtaatcttctttttcccactcgctgcctggtaggctaagaatcgtttcacgtaaatggctgcccatactgttattcgcgagccacagatcttcagccggataaatatcggacatgccaggcacgataatacggcaagcataaacgcccagatgctcgtaatcggcaatataaacttctttatcttctttgttgaagatagccatcagtgtggcgaactcttcttccgtggtgccggagaaattccagtccacaaacggataatcggcatcctgcttgaacaggtcccaggagattaaaccgctggaatcgataaagtgcgtttcgaggttggtatgttcagcgacttcttcatcatcgaaggttggcggagtaaacacatccaaatctttcaggccacgaccttgcagcagctcggtcacggtacgttccagtgctacgccaaaatcaggatgcgcaccgaaagaggcaaagcaggtaccgttagcaggattgaacagtaccacgcaaatcaccggatactggccgccaaggctaccgtcataagcgaagattgggaaaccctccgcttccagcgtttcgatggcttcaactactgctgggtaacgcgccagcacgtctgccgggatctctggcaggctgatgctttcagcaataatgcggtttttcacgtagcgttcgaaaacttcagacaatccctgaacgcgtgcttcgttgcgggtattacctgcggacataccgttggagacgtacaggttaccaatgatattcatcggaatataaacggtctgattgtcggactgacgcgtaaacggcaggccgcaaataccacgatcttcgttaccggattgtaggtcaatcagcatgctgccggtcagttcattctccggatcataaaacgcgcgcagacggtcatcgagcagcccttctggcacatcgtcattttcggtcagtgggaaccatttttcgttgggataatgcacgaacggaccgttggcgatggtttcgcccagccagaagtccgcaaaaaagtagttggtactgagacgctcgaaatattcaccgagtgcagaagccagcgccgctttcttggttgcgcctttaccgttggtaaaacacagtgcgcactctttgtcgcgaatatgtacagaccagacgttaggcacgggattcagccaggaggcctcttcaatctgaaagccgaggtcactaagtttttgctggaagcgagcgatggaatcttccagagcggcatctttgccggggataaatgtttgcgtcatgaaaatcactttagtcgtacggaaagcgcgcaataatacgggttttatctcaaaggcgctatcaccgccgccatgccgatgaactgttgactatgcttttagcggataaaccacgttaagagcataaaaatgaaggcgttcgatctccaccgtatggcatttgataaagtgccttttgatttccttggcgaagttgcactacgtagtctttatacctttgtactggtctttttgttcctcaaaatgaccggaagacgcggtgtgcggcagatgagcctgtttgaagttttaatcattctgacgctgggaagtgcggcgggagatgtggcgttttatgatgatgtgccgatggtcccggtacttatcgtctttattactctggcgttgttataccgcctggtaatgtggttgatggcgcacagtgaaaaactggaagatcttctggaaggcaagccagttgtcattattgaagatggcgagctggcctggagcaaactcaataactccaacatgacggaatttgagttctttatggagctacgattgcgtggcgtggagcagctggggcaggtacgtctggcgattctcgaaaccaacgggcaaatcagtgtctatttctttgaagatgacaaggtgaaaccgggtttacttattttacccagtgattgtacgcagcgttacaaagtggtgccggagagcgcggactatgcctgtattcgttgtagtgaaatcattcatatgaaagcgggggaaaaacaattatgtccgcgctgtgcaaatccagaatggacgaaggcaagtcgggcaaaacgggtgacctgacagtaaaaacatcggctttttgctaataatccgagagattcttttgtgtgatgcaagccacatttttgccctcaacggttttactcattgcgatgtgtgtcactgaatgataaaaccgatagccacaggaataatgtattacctgtggtcgcaatcgattgaccgcgggttaatagcaacgcaacgtggtgaggggaaatggctcaaatcttcaattttagttctggtccggcaatgctaccggcagaggtgcttaaacaggctcaacaggaactgcgcgactggaacggtcttggtacgagcgtgatggaagtgagtcaccgtggcaaagagttcattcaggttgcagaggaagccgagaaggattttcgcgatcttcttaatgtcccctccaactacaaggtattattctgccatggcggtggtcgcggtcagtttgctgcggtaccgctgaatattctcggtgataaaaccaccgcagattatgttgatgccggttactgggcggcaagtgccattaaagaagcgaaaaaatactgcacgcctaatgtctttgacgccaaagtgactgttgatggtctgcgcgcggttaagccaatgcgtgaatggcaactctctgataatgctgcttatatgcattattgcccgaatgaaaccatcgatggtatcgccatcgacgaaacgccagacttcggcgcagatgtggtggtcgccgctgacttctctagtaccattctttcccgtccgattgacgtcagccgttatggtgtaatttacgctggcgcgcagaaaaatatcggcccggctggcctgacaatcgtcatcgttcgtgaagatttgctgggcaaagcgaatatcgcgtgtccgagcattctggattattccatcctcaacgataacggctccatgtttaacacgccgccgacatttgcctggtatctatctggtctggtctttaaatggctgaaagcgaacggcggtgtagctgaaatggataaaatcaatcagcaaaaagcagaactgctatatggggtgattgataacagcgatttctaccgcaatgacgtggcgaaagctaaccgtagccggatgaacgtgccgttccagttggcggacagtgcgcttgacaaattgttccttgaagagtcttttgctgctggccttcatgcactgaaaggtcaccgtgtggtcggcggaatgcgcgcttctatttataacgccatgccgctggaaggcgttaaagcgctgacagacttcatggttgagttcgaacgccgtcacggttaatgccgaaattttgcttaatccccacagccagcctgtggggtttttatttctgttgtagagagttgagttcatggaatccctgacgttacaacccatcgctcgtgtcgatggcactattaatctgcccggttccaagagcgtttctaaccgcgctttattgctggcggcattagcacacggcaaaacagtattaaccaatctgctggatagcgatgacgtgcgccatatgctgaatgcattaacagcgttaggggtaagctatacgcttagtgccgatcgtacgcgttgcgaaattatcggtaacggcggtccattacacgcagaaggtgccctggagttgttcctcggtaacgccggaacggcaatgcgtccgctggcggcagctctttgtctgggtagcaatgatattgtgctgaccggtgagccgcgtatgaaagaacgcccgattggtcatctggtggatgcgctgcgcctgggcggggcgaagatcacttacctggaacaagaaaattatccgccgttgcgtttacagggcggctttactggcggcaacgttgacgttgatggctccgtttccagccaattcctcaccgcactgttaatgactgcgcctcttgcgccggaagatacggtgattcgtattaaaggcgatctggtttctaaaccttatatcgacatcacactcaatctgatgaagacgtttggtgttgaaattgaaaatcagcactatcaacaatttgtcgtaaaaggcgggcagtcttatcagtctccgggtacttatttggtcgaaggcgatgcatctagcgcttcttactttctggcagcagcagcaatcaaaggcggcactgtaaaagtgaccggtattggacgtaacagtatgcagggtgatattcgctttgctgatgtgctggaaaaaatgggcgcgaccatttgctggggcgatgattatatttcctgcacgcgtggtgaactgaacgctattgatatggatatgaaccatattcctgatgcggcgatgaccattgccacggcggcgttatttgcaaaaggcaccaccacgctgcgcaatatctataactggcgtgttaaagagaccgatcgcctgtttgcgatggcaacagaactgcgtaaagtcggcgcggaagtggaagaggggcacgattacattcgtatcactcctccggaaaaactgaactttgccgagatcgcgacatacaatgatcaccggatggcgatgtgtttcagcctggtggcgttgagtgatacaccagtgacgattcttgatcccaaatgcacggccaaaacatttccggattatttcgagcagctggcgcggattagccaggcagcctgaatgaacaacgggcaataaatagccaaatctttctttatcaaaacgtcggcacattgtcggcgttttttttcggaccttgtgagtcattttgattaatggtagcgtcgcttgtcaatgtaagttgttgatacataatatttatatatgattaatcaacggatgattcacatgaagaatactaaattactgctggcgattgcgacctctgcagcattactgacagggtgtcaaaatacccacggtattgataccaatatggctatcagctccggtttaaatgcctataaagcagcaacattaagcgatgccgatgcaaaagcgattgccaatcagggctgtgccgaaatggacagcggcaatcaagtcgcaagtaaatccagcaagtacggtaaacgtctggcaaaaatcgccaaagcattgggtaacaatattaatggcacgccggtcaactataaggtttatatgaccagcgacgtcaacgcatgggcgatggcgaacggctgtgttcgtgtctacagtggcctgatggacatgatgaatgacaacgaaattgaaggcgttctgggccatgaactgggccacgtcgcgttgggtcacagcctggctgaaatgaaagcttcttatgcgatcgttgccgcacgcgatgccattagtgctaccagcggtgtggcttcccagctttcccgcagtcaattaggtgatatcgcagaaggcgctatcaatgctaaatactcccgtgataaagagtccgaagcagatgatttctcctttgatctgttgaagaaacgtggcatcagcacccaggggctggttggcagctttgaaacactggctagcctggatggcggtcgcacccagtccatgtttgactctcacccaccaagtacagagcgtgcgcaacacatccgtgatcgtatcgcctctggtaagtaaatcattgtcatctttcgggctggtcttctgccagcccgctataattgcgcaataaatccccatctgaatacagacaaaactggtttttgcacacaacgttaacgatttgtggcgtcggcgcgtataatgcgcgcggttatgttaacggtacgcctgttttaaggagataaagatgacggcaattgccccggttattaccattgatggcccaagcggtgcagggaaaggcaccttgtgtaaggctatggcggaagcgttgcaatggcatctgctggacagcggtgcaatttatcgcgtactggcattggcggcattacatcaccatgttgatgttgcgagcgaagatgcgctggtaccgctggcatcccatctggatgtacgttttgtgagcaccaatggcaatctggaagtgatcctcgaaggggaagatgtcagcggcgaaattcgtactcaggaagtggcgaatgcagctagtcaagtcgcggcattcccacgcgttcgtgaagcattattgcgtcgccaacgcgcgtttcgcgaattaccaggtctgattgccgatggccgcgacatgggaacggtggtattccctgatgcaccagtgaaaattttccttgacgcctccagcgaagaacgtgcgcatcgccgcatgctacagttgcaggagaagggctttagtgttaactttgagcgccttttggccgagatcaaagaacgcgacgaccgcgatcgtaaccgagcggtagcgccactggttccggcagccgatgctttagtgttggattccaccaccttaagcattgagcaagtgattgaaaaagcgctacaatacgcgcgccagaaattggctctcgcataagcgaccgaatttgcagtacccccgttgcaatggaatgacagcgggtatgttaaacaaccccatccggcatggagccaggtggacgttaaatataaacctgaagattaaacatgactgaatcttttgctcaactctttgaagagtccttaaaagaaatcgaaacccgcccgggttctatcgttcgtggcgttgttgttgctatcgacaaagacgtagtactggttgacgctggtctgaaatctgagtccgccatcccggctgagcagttcaaaaacgcccagggcgagctggaaatccaggtaggtgacgaagttgacgttgctctggacgcagtagaagacggcttcggtgaaactctgctgtcccgtgagaaagctaaacgtcacgaagcctggatcacgctggaaaaagcttacgaagatgctgaaactgttaccggtgttatcaacggcaaagttaagggcggcttcactgttgagctgaacggtattcgtgcgttcctgccaggttctctggtagacgttcgtccggtgcgtgacactctgcacctggaaggcaaagagcttgaatttaaagtaatcaagctggatcagaagcgcaacaacgttgttgtttctcgtcgtgccgttatcgaatccgaaaacagcgcagagcgcgatcagctgctggaaaacctgcaggaaggcatggaagttaaaggtatcgttaagaacctcactgactacggtgcattcgttgatctgggcggcgttgacggcctgctgcacatcactgacatggcctggaaacgcgttaagcatccgagcgaaatcgtcaacgtgggcgacgaaatcactgttaaagtgctgaagttcgaccgcgaacgtacccgtgtatccctgggcctgaaacagctgggcgaagatccgtgggtagctatcgctaaacgttatccggaaggtaccaaactgactggtcgcgtgaccaacctgaccgactacggctgcttcgttgaaatcgaagaaggcgttgaaggcctggtacacgtttccgaaatggactggaccaacaaaaacatccacccgtccaaagttgttaacgttggcgatgtagtggaagttatggttctggatatcgacgaagaacgtcgtcgtatctccctgggtctgaaacagtgcaaagctaacccgtggcagcagttcgcggaaacccacaacaagggcgaccgtgttgaaggtaaaatcaagtctatcactgacttcggtatcttcatcggcttggacggcggcatcgacggcctggttcacctgtctgacatctcctggaacgttgcaggcgaagaagcagttcgtgaatacaaaaaaggcgacgaaatcgctgcagttgttctgcaggttgacgcagaacgtgaacgtatctccctgggcgttaaacagctcgcagaagatccgttcaacaactgggttgctctgaacaagaaaggcgctatcgtaaccggtaaagtaactgcagttgacgctaaaggcgcaaccgtagaactggctgacggcgttgaaggttacctgcgtgcttctgaagcatcccgtgaccgcgttgaagacgctaccctggttctgagcgttggcgacgaagttgaagctaaattcaccggcgttgatcgtaaaaaccgcgcaatcagcctgtctgttcgtgcgaaagacgaagctgacgagaaagatgcaatcgcaactgttaacaaacaggaagatgcaaacttctccaacaacgcaatggctgaagctttcaaagcagctaaaggcgagtaattctctgactcttcgggatttttattccgaagtttgttgagtttacttgacagattgcaggtttcgtcctgtaatcaagcactaagggcggctacggccgcccttaatcaatgcagcaacagcagccgcttaatttgcctttaaggaaccggaggaatcatgaccaagagtgaattgatagaaagacttgccacccagcaaagccacattcccgccaagacggttgaagatgcagtaaaagagatgctggagcatatggccagcactcttgcgcagggcgagcgtattgaaatccgcggtttcggcagtttctctttgcactaccgcgcaccacgtaccggacgtaatccgaagactggcgataaagtagaactggaaggaaaatacgttcctcactttaaacttggtaaagaactgcgcgatcgcgccaatatttacggttaagttttttactcaaacttgaacgagagaaaagcacctgtcgggtgcttttttcatttctctaatctggaactggaagctgcctcgcagagttttgaacagttttcaccctttcgttaaattcttctgaatatgcctcggggaacgcaaaattcccaccagacaaccgctcaacaaagttgcacactttccataaacagggaggggtgcatgaaaataacgacagtcggtgtatgcataattagcggaatttttccgttgctgattttgccccaattgcctgggacattaacccttgcgtttctgactctcttcgcctgcgtactggcatttatccctgttaaaaccgtccgttatatcgcgctgacgttgctgtttttcgtttggggcatattaagtgcaaagcaaattttgtgggcaggagaaaccttaactggcgcgacgcaggatgcaattgttgagatcactgcaactgacggcatgaccactcattacggtcaaattactcatctacaaggtcgacgtatattccctgcgagtggtctcgtgatgtatggcgaatatcttccgcaagcggtttgtgctggacaacaatggagtatgaaactcaaagttcgtgcagttcatggccaacttaatgatggcggctttgatagccagcgttatgccattgcccagcatcagccgctcaccggccgttttctgcaggcaagtgtcattgaaccgaattgtagcctgcgtgcacagtatctggcgagtctacaaacaacgctgcaaccctatccgtggaatgcggttattcttggtttaggtatgggggaacggttatccgtccccaaagaaatcaaaaatatcatgcgcgatactggaacggcgcatttaatggcgataagcggattgcacatcgcttttgcggcgttgctggctgccggactcattcgcagtggacaaatttttctgcctgggcgctggatccactggcaaataccattaattggcggaatctgctgtgctgctttttatgcctggttgacgggaatgcaacctcctgcattgcgtaccatggtggcgcttgctacgtggggaatgcttaagttaagtgggcgacagtggagtggctgggatgtatggatatgttgtctggcggcaattttgctgatggatcctgttgccattctcagccaaagtttatggctctctgccgctgcggtcgcggcattgatattttggtatcagtggtttccctgtcctgagtggcaactgccgccggtattgcgtgcagttgtttccctcatccatctgcaactgggaatcacacttctgcttatgcccgtgcaaatcgtcatatttcatggcattagtctgaccagctttattgcaaatctattagcaattcccttggtgacatttatcacggttccgttgatcctcgccgcgatggttgtgcatttaagcgggccgttaatcctggagcaagggttatggtttcttgccgaccggtctttggctttacttttctgggggttaaagagtttgccggaagggtggatcaacattgctgaatgttggcaatggctaagtttttccccatggttcttactggtggtatggcgattaaacgcctggcgaacgttgccagcaatgtgtgtggctggaggcttgctgatgtgctggccgctgtggcaaaaacctcgacctgacgagtggcagctgtacatgcttgatgtcgggcaagggctggcaatggtgatagccagaaacggcaaagcgattctctatgacacaggactggcctggcctgaaggggatagtgggcaacaactgattatcccctggctccactggcataatcttgaaccggaaggcgttattctgagccatgaacatctggatcaccggggagggctggatagtatattgcatatatggccgatgttatggatcagaagtccgttaaactgggaacatcatcagccctgtgtgcgtggcgaagcgtggcaatggcaaggattgcgtttcagcgcgcactggcctttacaaggtagcaacgataaaggaaataaccattcctgtgtggttaaggttgatgacgggacgaatagcattcttctaaccggtgatattgaagccccagctgaacaaaagatgctaagccgttactggcagcaagtgcaggcaacattgcttcaggtacctcaccatggcagtaataccagtagtagcttgccattaattcagcgagtgaatggaaaagtggcactcgcaagcgcaagccgctataacgcatggcgactgccctctaacaaagttaagcatcgctatcaactgcaaggatatcaatggattgatactccacatcaaggtcaaacaacggtcaattttagtgcgcaaggctggcggattagcagcctcagggagcaaattttacctcgttggtatcatcagtggtttggcgtgccagtggataacgggtaaaatatgcggctatttcaacaaatgctggttttttgaatgcataacgacaaagatctctctacgtggcagacattccgccgactgtggccaaccattgcgcctttcaaagcgggtctgatcgtggcgggcgtagcgttaatcctcaacgcagccagcgataccttcatgttaagcctccttaagccacttcttgatgatggctttggtaaaacagatcgctccgtgctggtgtggatgccgctggtggtgatcgggctgatgattttacgtggtatcaccagctatgtctccagctactgtatctcctgggtaagtggaaaggtggtaatgaccatgcgtcgccgcctgtttggtcacatgatgggaatgccagttagtttctttgacaaacagagtacgggtacgctgttgagtcgtattacctacgattccgaacaggttgcttcttcttcttccggcgcactgattactgttgtgcgtgaaggtgcgagcatcatcggcctgttcatcatgatgttctattacagttggcaactgagcatcattttgattgtgctggcaccgattgttagcattgcgattcgcgttgtaagcaagcgttttcgcaacatcagtaaaaacatgcagaacaccatggggcaggtgaccaccagcgcagaacaaatgctgaagggccacaaagaagtattgattttcggtggtcaggaagtggaaacgaaacgctttgataaagtcagcaaccgaatgcgtcttcaggggatgaaaatggttagtgcctcttccatctctgatccgatcattcagctgatcgcctctttggcgctggcgtttgttctgtatgcggcgagcttcccaagtgtcatggatagcctgactgccggtacgattaccgttgttttctctagtatgattgcactgatgcgtccgctgaaaagcctgaccaacgttaacgcccagttccagcgcggtatggcggcttgtcagacgctgtttaccattctggacagtgagcaggagaaagatgaaggtaagcgcgtgatcgagcgtgcgactggcgacgtggaattccgcaatgtcacctttacttatccgggacgtgacgtacctgcattgcgtaacatcaacctgaaaattccggcagggaagacggttgctctggttggacgctctggtagcggtaaaagtaccatcgccagcctgatcacgcgtttttacgatattgatgaaggcgaaatcctgatggatggtcacgatctgcgcgagtataccctggcgagcttacgtaaccaggttgctctggtgagccagaatgtccatctgtttaacgatacggttgctaacaacattgcttacgcacggactgaacagtacagccgtgagcaaattgaagaagcggcgcgtatggcctacgccatggacttcatcaataagatggataacggtctcgatacagtgattggtgaaaacggcgtgctgctctctggcggtcagcgtcagcgtattgctatcgctcgagccttgttgcgtgatagcccgattctgattctggacgaagctaccagcgctctggataccgaatccgaacgtgcgattcaggcggcactggatgagttgcagaaaaaccgtacctctctggtgattgcccaccgcttgtctaccattgaaaaggcagacgaaatcgtggtcgtcgaggatggtgtcattgtggaacgcggtacgcataacgatttgcttgagcaccgcggcgtttacgcgcaacttcacaaaatgcagtttggccaatgatcgaaaaaatctggtctggtgaatcccctttgtggcggctattgctgccactctcctggttgtatggcctggtgagtggcgcgatccgtctttgctataaactaaaactgaagcgcgcctggcgtgcccccgtaccggttgtcgtggttggtaatctcaccgcaggcggcaacggaaaaaccccggtcgttgtctggctggtggaacagttgcaacagcgcggtattcgcgtgggggtcgtaagccggggatatggtggtaaggctgaatcttatccgctgttattgagcgcagataccacaacagcacaggcgggtgatgaacctgtgttgatttatcaacgcactgatgcgcctgttgcggtttctcccgttcgttctgatgcggtaaaagccattctggcgcaacaccctgatgtgcagatcatcgtaaccgacgacggtttacagcattaccgtctggcgcgtgatgtggaaattgtcgttattgatggtgtgcgtcgctttggcaatggctggtggttgccggcggggccaatgcgtgagcgagcggggcgcttaaagagcgttgatgcggtaatcgtcaacggcggtgtccctcgcagcggtgaaatccccatgcatctgctgccgggtcaggcggtgaatttacgtaccggtacgcgttgtgacgttgctcagcttgaacatgtagtggcgatggcggggattgggcatccgccgcgcttttttgccacgctgaagatgtgtggcgtacaaccggaaaaatgtgtaccgctggccgatcatcagtctttgaaccatgcggatgtcagtgcgttggtaagcgccgggcaaacgctggtaatgactgaaaaagatgcggtgaaatgccgggcctttgcagaagaaaattggtggtatttgcctgtagacgcacagcttagtggtgatgaaccagcgaaactgcttacgcaactaaccttgctggcttctggcaactaattacgccgcggcagcgttcgattgatggagtcatgaatgagcctgccgcacctctcccttgctgatgcgcgtaatcttcaccttgccgcacaaggcctgttaaacaaaccccgccgtcgagcgagcttggaggatattccggcaacgatctcccgcatgtccttgctgcaaatcgataccatcaatattgttgcccgtagtccatatctggtgcttttcagtcgtctgggaaattatcctgcccagtggctggatgagtctctggcgcgtggcgaattaatggaatactgggcgcatgaagcctgctttatgccgcgtagcgactttcgtcttattcgccaccgcatgctggcacctgaaaaaatgggctggaaatacaaagacgcctggatgcaggaacatgaggcggaaattgcacagttaattcagcatattcatgataaggggccggtacgtagtgccgattttgagcatcctcgtaaaggtgcaagcggctggtgggaatggaagccgcataaacggcatctggaaggtttatttactgccggaaaggtgatggtgattgaacggcgcaacttccagcgcgtttatgatttaacccaccgtgtcatgcctgactgggatgatgagcgcgatctcgttagccaaacagaagcagaaatcatcatgctggataacagtgcgcgtagcctgggaatattccgcgaacagtggctggcagattactatcggctgaaacgtccggcactggcggcgtggcgcgaagcgagggctgaacagcagcaaatcattgctgtgcatgttgaaaaattgggcaatctttggctgcatgatgatttgctgccgctactcgagcgagcgctggccggaaagctcactgcaacgcacagcgcggtacttagcccttttgatcctgttgtctgggatcgcaaacgcgcagagcagctttttgattttagctaccggctggagtgctataccccagcgccgaaacgccagtatggctattttgttctgccgttattacatcgtgggcaattagttgggcgaatggatgccaaaatgcatcgccagacaggcatccttgaagttatctctctgtggttacaggaaggtattaaaccaacgacaacgctgcaaaaagggctacgtcaggcgattactgatttcgctaactggcagcaggcaacgcgggtgacattaggatgctgcccgcaaggcctctttactgattgccgcaccggctgggaaatagaccccgtcgcataaatgattatgataagatttatgcattcataacccgatccatctggaggaactatggatcatcgtctgcttgaaatcattgcctgcccggtttgcaacggaaaactttggtataaccaggaaaaacaagagcttatttgcaaactggacaacctcgctttcccgctgcgtgatggcattccagtgttgctggaaacggaagcccgcgtgctgactgctgatgagagtaaaagttgatgtaaactgctgatgagagtaaatcatgagttttgtggtcattattcccgcgcgctacgcgtccacgcgtctgcccggtaaaccattggttgatattaacggcaaacccatgattgttcatgttcttgaacgcgcgcgtgaaagtggtgccgagcgcatcatcgtggcaaccgatcatgaggatgttgcccgcgccgttgaagccgctggcggtgaagtatgtatgacgcgcgccgatcatcagagtggaacagaacgtctggcggaagttgtcgaaaaatgcgcattcagcgacgacacggtgatcgttaatgtgcagggtgatgaaccgatgatccctgcgacaatcattcgtcaggttgctgataacctcgctcagcgtcaggtgggtatggcgactctggcggtgccaatccacaatgcggaagaagcgtttaacccgaatgcggtgaaagtggttctcgacgctgaagggtatgcactgtacttctctcgcgccaccattccttgggatcgtgatcgttttgcagaaggccttgaaaccgttggcgataacttcctgcgtcatcttggtatttatggctaccgtgcaggctttatccgtcgttacgtcaactggcagccaagtccgttagaacacatcgaaatgttagagcagcttcgtgttctgtggtacggcgaaaaaatccatgttgctgttgctcaggaagttcctggcacaggtgtggatacccctgaagatcttgagcgcgttcgcgctgaaatgcgctaatttcacttcacgacacttcagccaattttgggaggagtgtcgtaccgttacgattttcctcaatttttcttttcaacaattgatctcattcaggtgacatcttttatattggcgctcattatgaaagcagtagcttttatgagggtaatctgaatggaacagctgcgtgccgaattaagccatttactgggcgaaaaactcagtcgtattgagtgcgtcaatgaaaaagcggatacggcgttgtgggctttgtatgacagccagggaaacccaatgccgttaatggcaagaagctttagtacgcccggaaaagcccgacaactggcatggaaaaccaccatgctggcaagaagtgggactgtccgtatgccgactatttatggtgtgatgacgcatgaagaacaccccggccccgatgtcctgctactggagcggatgcgtggtgttagcgtggaggcaccagcccgaacaccagaacgctgggaacaactcaaagaccaaatcgttgaagccttactggcctggcaccgtcaggacagtcgcggttgcgtcggcgcggtcgacaatactcaggaaaatttctggcccagttggtaccggcaacatgttgaagtgctatggaccacgctcaatcagttcaataacaccggtctgacgatgcaggataagcggatcctgtttcgcactcgcgaatgtctcccggcattatttgaaggctttaacgacaattgtgtgctgattcacggtaacttctgtttacgcagcatgttgaaagatagccgcagcgatcagttactggcgatggtcgggccgggactaatgctttgggcaccgcgagaatacgaactgttccgactaatggataattctctggcggaagatttgctctggagttacctgcaacgcgcgccagtggcggagagcttcatctggcggcgttggttgtatgtgttatgggatgaagttgcgcaactggttaataccggacgatttagtcggcgcaacttcgatctggcaagtaaaagtctcttgccgtggctcgcctgatcactcttgccgtggctcgccactgctaccttttagccactgccagatacggccaagcgtttcatagccaacacgatcgctatgcatcaaccagaccggagaagggattgcccgttcccacgggttaagcgggctgtcgatggccaactgattcgccggggctggtagcggatttaacccttcctgctgaaaaaagatcatcgcccgcggcagatgacttgcggaggtcaccagcaggaaaggggcgtcaccaatcgcctgtttcactgctgcagcttcttcttcggtatcttttggcaaatccagggtgataatttgctcgcgcggcacgcccaggctttgcgcaactctggcacctacttccgctgtactcaccgtattggtttttgctacgcctcccgtgaagatcagtttacttcccggattttcgcgccataagcgaataccttcattcaggcgtggcagactgttattgattaaattagagctcggtgcccactgcgggttccaggtataaccacctccgagcaccacgatatagtccactttttggctattattccatgtcggataggtgctttcgatgggacgcagcaggcggtcggctaccggttgcaaactcaataacaagagcgccagccacccaatgctaataaaaatcttcccggttttttgaaaacggctaaaccacagcagcgccaggccagcgccaataatcaacaacatcagcggaagtggcagcaacatattgccaatcacttttttcagtgtaaaaagcatcctttctggttccttttttaaccatatagcaagggatcgccagcgatattacaccagacgggttcattctcgccgtggctgtgacaaaatagcgtctttatcagaaaacgtcttagccaaccggtggagaaagcaatgcaggatcgcaattttgatgatattgcggaaaagttttcccgtaacatttacggcaccaccaaagggcagcttcgacaggctattctgtggcaggatctcgatcgcgtgctggcggaaatgggcccgcaaaaactgcgtgtgctggatgctggcggtggagaagggcagaccgcaatcaaaatggccgagcgtgggcatcaggtcattttatgcgatctttctgcgcagatgatcgaccgcgcaaaacaggcggcagaagcaaaaggtgtgagcgacaacatgcaatttatacattgcgccgctcaggatgttgctagccatttggaaacgcccgttgatctgatattgttccatgcggtgctcgagtgggtggctgatccccgcagcgtattgcagaccctctggagtgtgttgcgtccaggcggcgtgttgagcttaatgttctacaatgcgcatggtttgttgatgcataacatggtcgccgggaattttgattacgtgcaggcgggaatgccgaaaaagaaaaaacggacgcttagcccagattatccacgcgacccggcgcaggtttatctgtggctggaagaagctggttggcaaattatgggtaagacaggcgttcgcgtgtttcatgattatctgcgcgagaaacaccagcagcgcgactgctatgaagcattacttgaattagaaacgcgttattgccgtcaggaaccgtatattaccctggggcgttatattcatgtcaccgcgcgcaaaccgcagagcaaggataaagtatgagtgaattttcccagacagtccccgaactggttgcctgggccagaaaaaatgacttctccatcagcctgccggtagaccgactctcttttctgctggcggttgccacgctgaacggcgagcgtctggatggtgagatgagtgaaggcgagctggtggatgcattccgccatgtgagtgatgcgtttgagcaaaccagcgaaaccatcggcgtgcgcgccaataacgcgatcaacgacatggtgcgtcaacgtctgctgaaccgctttaccagcgagcaggcggaagggaacgcaatttaccgtctgacgccgctcggcatcggcattactgactactacatccgtcagcgcgagttttctacgctgcgtctttctatgcagttgagcattgtggcgggtgagctcaaacgcgcagcagatgccgccgaagagggcggtgatgaatttcactggcaccgtaatgtctatgcgccactgaaatatagcgtagcagaaattttcgacagtatcgacctgacgcaacgtctgatggacgaacagcagcagcaggtgaaggacgatatcgcccagttgctgaacaaagactggcgggcggcgatttccagctgtgaattgttgcttagcgaaacttccggaacgctgcgtgaattgcaggatacgctggaagcggcaggcgacaaattgcaggctaatctgttgcgcattcaggatgcgacgatgacccatgacgatctgcatttcgtcgatcgtctggtgttcgatctgcagagcaaactcgatcgtattatcagttggggccagcaatccatcgacttgtggattggctacgaccgccacgtacacaaatttattcgtaccgcgatcgatatggataaaaaccgcgtctttgctcagcggttacgtcagagcgtacaaacctattttgatgagccgtgggcgctaacttatgccaatgccgatcgtctgctggatatgcgtgacgaagagatggcactgcgcgatgaagaagtgactggggaacttcctgaggatctggaatacgaagagtttaacgagatccgcgaacagctggcggcgatcatcgaagaacaacttgccgtgtacaaaaccagacaagtgccgctggatcttggtctggtggtacgcgaatatctgagtcagtatccgcgtgcacgtcactttgacgttgcgcgtattgttattgatcaggcggtacgtcttggcgtagcgcaagcagatttcaccggactgccagcgaaatggcagccgattaatgattacggagccaaggtacaggcgcatgtcatcgacaaatattgaacaagtgatgccggttaagctggcgcaggcgctggcgaatccgttatttccggcgctggacagcgccttacgtagtggacgccatattggcctcgacgaactggataatcatgcattcctgatggattttcaggaatatctggaagagttttacgcgcgttataacgttgagcttattcgcgcaccagaagggttcttctatttacgcccacgttccaccacgctgatccctcgttccgtcttgagcgaactggatatgatggtcgggaaaatcctctgttatctctatctcagcccggaacggctggcgaatgaggggattttcacccagcaggaactgtacgacgaactgctcaccctggccgatgaagcaaaactgctgaaactggtgaacaaccgtagtaccggtagtgacgttgaccgtcagaagttgcaggagaaagtacgttctagcctcaaccgtctgcgtcgtttaggcatggtgtggtttatgggccacgacagcagcaagtttcgcattaccgaaagcgtgttccgcttcggagccgatgtgcgtgctggcgacgatccccgtgaagcacagcgtcgcctgattcgtgatggcgaagcaatgccgattgaaaatcatctgcaactcaacgatgaaaccgaagagaatcagccagatagcggagaggaagaataatgattgaacgcggtaaatttcgcagtctgacgctgattaactggaacggcttttttgcccgaacttttgaccttgacgagctggtcacgacgctttctggcggtaacggggcgggtaaatccaccaccatggcggcgttcgttacggcgctgatccccgacctgaccctgctgcatttccgtaacactacggaagccggggccaccagcggtagccgcgataaaggtctgcacggtaagctgaaagcgggtgtctgttatagcatgctcgacaccattaacagccgccaccagcgcgtggtggtcggtgtgcgtctgcaacaggttgccggacgcgatcgtaaagtggatatcaagccgtttgccattcagggactgccgatgagcgtgcagccgacacagctggtgaccgaaaccctgaacgaacgccaggcgcgcgtgctgccgcttaacgagctgaaagacaagctcgaggcgatggaaggcgtgcagtttaaacagttcaactccattactgattaccacagcctgatgttcgatctgggcatcatcgcgcgtcgtctgcgctccgcatctgaccgtagcaaattctatcgtctgatcgaagctagcctgtatggcgggatctccagtgccattacccgttctctgcgcgactacctgttgccagaaaacagcggcgtgcgtaaagcgttccaggacatggaagcggcgctgcgtgaaaaccgtatgacgctggaagcgattcgtgtcacccagagcgaccgcgacctgtttaagcatctgatcagcgaagccaccaactacgtggcggcggactacatgcgtcacgccaacgagcgccgtgtccatctcgacaaagccctggagtttcgtcgcgagctacatactagccgtcagcaactggcggctgagcagtacaaacacgtcgatatggcgcgtgagctggcagagcacaacggtgccgaaggcgatctggaagcggattatcaggcggccagtgatcacctgaacctggtgcaaaccgcactgcgtcagcaggagaagatcgaacgctacgaagcggatctcgatgagctgcagatccgtctggaagagcaaaatgaagtggtggcagaagccatcgaacgccagcaagagaatgaggctcgtgcggaagctgccgaactggaagtggacgagctgaaaagccagcttgctgactaccagcaggcgctggacgtccagcaaacgcgcgcgatccagtataaccaggcgattgctgcgcttaatcgtgccaaagaactgtgccatctgccggacttaaccgccgactgcgccgccgaatggctggaaaccttccaggcgaaagagctggaagcgactgaaaaaatgctctctcttgagcagaaaatgagcatggcgcaaaccgcgcacagccagtttgagcaggcttatcagctggtggtggcaatcaacggcccactggcgcgtaacgaggcgtgggatgtcgctcgcgaactattgcgcgaaggggtcgatcagcgtcacctggcagagcaggttcagccgctgcggatgcgattaagcgaactggaacagcgtctacgcgagcagcaagaagctgagcgtctgctggcagatttctgcaaacgtcagggcaagaattttgatatcgacgaactggaagccctgcatcaggaactggaagcacgcattgcctctctttccgatagcgtgtctaacgcccgtgaagagcgcatggcactgcgccaggagcaggaacagctgcagtctcgcattcagagtttgatgcagcgtgcgccggtttggctggcagcgcaaaacagtctcaaccagttgagcgaacagtgcggcgaagagtttacctccagccaggacgtcaccgaatatctgcaacagttgctggagcgtgagcgagaggcgattgttgaacgcgatgaagtgggcgcgcgcaaaaacgccgtcgatgaagagatcgaacgtttaagccagcctggcggctctgaagatcagcgtctgaacgcgctggcggagcgttttggtggtgtgctgctgagtgaaatttatgacgacgttagcctggaagatgcgccgtacttcagtgcgctgtatggcccgagtcgccacgccatcgtggtgccagatctgagtcaggtaactgaacacctggaaggcttgaccgattgcccggaagatctctatctgatcgaaggagatccgcagagtttcgatgacagcgtgttcagcgttgatgagctggaaaaagcggtagtggtgaaaatcgccgatcgtcagtggcgttatagtcgtttcccggaagtgccgctgtttggtcgtgctgcgcgtgaaagccgtattgaaagcctccatgccgagcgtgaagtgctttccgaacgcttcgccacgctctcctttgatgtacagaaaactcagcgtctgcatcaggcgttcagccgctttatcggcagtcatctggcggttgcgtttgagtctgacccggaagcagaaatccgtcaactgaacagccgtcgcgtcgaactggagcgggcgttaagtaatcatgaaaatgataaccagcagcagcgtattcagtttgagcaggcgaaagagggcgttacggcgctgaaccgcattctgccgcgtctcaacctgttggctgatgacagcctggcggatcgcgtcgatgaaatccgcgaacgtctggatgaagcccaggaagccgcgcgttttgttcagcagtttggcaatcaactggcgaaactggaaccgattgttagcgtattgcagagcgacccggaacagttcgaacagttaaaagaagattacgcgtactctcagcagatgcagcgcgatgcccgtcagcaggcgtttgccctgacggaagtggtgcagcgtcgtgcgcactttagctattctgacagcgcagaaatgcttagcggtaacagcgatctcaacgaaaaactgcgtgaacgtctggaacaggcggaagcggagcgtacccgcgctcgcgaagcgttgcgcggtcacgcagcgcagttgagtcagtacaaccaggtgctggctagcctgaaaagttcttacgacaccaaaaaagagctactcaacgatctgcaacgtgaattgcaggatatcggcgtgcgtgctgatagcggggcagaagagcgggcgcgtattcgccgtgacgagctgcatgcgcaactgagcaataaccgtagtcgccgcaatcaactggaaaaagcgcttaccttctgcgaagcggagatggacaacctgacccgcaaactgcgcaagctggagcgggattactttgagatgcgcgagcaggtagtgaccgccaaagcgggctggtgtgcggtgatgcgcatggtgaaagataacggcgttgagcgccgcttacaccgtcgtgagctggcttatctctccgctgatgatttgcgttccatgagcgataaggcgttaggtgcgctgcgtctggcggtggcggataacgaacatctgcgcgacgtgctgcgcatgagcgaagatccgaaacgtccggagcgtaaaattcagttcttcgtggcggtttatcagcatctgcgtgaacgtattcgtcaggatattattcgtaccgatgatccggtggaagctatcgaacagatggagattgaacttagccgtctgaccgaagaattaacctcccgtgaacagaaactggcgatcagttcccgcagcgtggcgaacatcattcgcaaaaccattcagcgcgagcagaaccgtatccgtatgctcaaccaggggttgcagaacgtaagctttggtcaggtgaacagcgtgcgtctcaacgtgaacgtgcgtgaaacgcacgccatgctactggatgtgctctctgaacagcacgagcagcatcaggatctgtttaacagcaaccgtttgaccttcagcgaagcgctggcgaaactgtatcaacgtcttaacccgcagattgatatggggcagcgcacgccgcagaccatcggtgaagaactgctggattaccgcaactatctggaaatggaagttgaggttaaccgtggttccgatggctggctgcgcgcagagtctggtgcattgagcaccggtgaggcgattggtaccggtatgagcattctggtgatggtggtacaaagctgggaagatgaatctcgccgcctgcgcggtaaagatatctctccttgccgcctgctgttcctcgatgaagcagcgcgactggatgctcgttctatcgccacgctgtttgaattgtgtgagcgtttgcaaatgcaactcatcatcgcagcgccggaaaatatcagcccggagaaaggcaccacctataaactggtgcgtaaagtcttccagaataccgaacacgttcatgtcgtcggcctgcgaggatttgcgccgcaactccctgaaacgcttccaggaactgacgaagcgccttctcaggcgagttaaaattaaggcggcagcaatgccgccttttctttttccgaaaactccgtttctgcactaaaaaagtggcacattacggcgcgcttttctttaaacttctttacattaggttatgtaaaaacgtatcggcgtttatatactgaagataagcctgatgagtaacaggcttgctcgtcatactttcgtgagtattggcgttgtacaggcaagtcgtaaaataacagcctggctattcagagtatgataaaaacagggggcaagggatgttgcttaatatgatgtgtggtcgtcagctgagcgcaatcagtttgtgcctggccgtaacattcgctccactgttcaatgcgcaggccgatgagcctgaagtaatccctggcgacagcccggtggctgtcagtgaacagggcgaggcactgccgcaggcgcaagccacggcaataatggcggggatccagccattgcctgaaggtgcggcagaaaaagcccgcacgcaaatcgaatctcaattacccgcaggttacaagccggtttatcttaaccagcttcaactgttgtatgccgcacgcgatatgcaacccatgtgggaaaaccgtgatgctgttaaagccttccagcaacagctggcagaggtggcgattgccggtttccagccgcagtttaataaatgggtagagttactgaccgatcctggtgttaacgggatggcacgcgacgtggtgctctctgatgcgatgatgggctatctccatttcattgcaaatattccggtcaaaggcactcgctggctatatagcagtaaaccttatgcacttgcaacgccgccgctcagcgtgattaaccaatggcagctggcgctggataaaggtcaattgcctacgtttgttgcaggactggcaccgcagcatccgcaatatgcggcgatgcatgaaagcttactggccttactctgtgacaccaaaccgtggccccaactgaccggcaaagcaacgttgcgcccagggcagtggagtaacgacgtaccggcgttgcgcgaaatattgcaacgcacaggcatgttggacggggggccgaaaattactctacctggcgatgacacgccaactgacgcggtagtcagcccatccgctgttactgttgaaacagcagaaactaagccgatggataagcaaacgacgtctcgtagtaaacctgcgcctgccgttcgcgccgcctacgataatgaactggtggaagccgttaaacgttttcaggcatggcaaggattgggggcagatggtgctattggcccggcaacacgtgactggttaaacgtaacgcccgcccagcgtgctggtgtgttggctctcaacatccagcgattgcgcttgctgccaacagagctttctaccgggatcatggttaacattccggcctatagcctggtctactatcagaacggcaatcaggtgctggatagccgagtcattgtcggtcgccccgatcgcaaaacgccgatgatgagcagtgcccttaacaacgtagtggtaaacccgccgtggaacgtacctccaactctggcacgcaaagatattctgccaaaagtgcgcaacgatccgggatatctcgaaagccatggctatacggtgatgcgcggctggaacagcagagaagcgattgacccatggcaggttgactggtctacaatcacggccagcaatttaccgttccgcttccagcaggctccaggcccacggaacagcctggggcgctataaattcaatatgccgagtagtgaggccatttatttgcatgacacgccgaaccacaatctgttcaagcgtgatacacgcgcattgagcagtggctgtgtacgagtgaataaagcttccgatctggcgaatatgctgttgcaggatgcaggctggaatgacaaacgtatttctgatgcgctgaagcagggtgatacacgttacgtcaatattcggcagagcattccggtgaatctctactacctgacggcctttgttggtgcagatggtcgtacccagtatcgtacagatatttacaattatgatctgcctgcgcgatccagcagccaaatcgtaagcaaagcggaacaattaatcaggtaaatgaagtagttcggggaaatcagttgtcgtaataattagcatgattgggggcgattctctgcagcccccgtcactgctggggttgagtcatcttgacgtctgctttacgggcggttaaggtgcctcttgtgcgccagaagtgcatataaacgataacattgacctgtagacttgattatcatggacaaattcgacgctaatcgccgcaaattgctggcgcttggtggcgttgcactcggtgccgccatcctgccgacccctgcgtttgcaacactctctaccccacgcccgcgcattttgacactcaataatcttcataccggagagagtatcaaagcggagtttttcgatggcagaggctatattcaggaagaattggcaaaacttaaccattttttccgcgattaccgcgcgaacaaaataaagtccatcgacccaggattattcgaccagttgtatcgcctgcaagggttgttaggcacgcgcaaaccggtgcaactcatttccggttatcgttctattgataccaacaatgaactacgcgcccgcagccgtggagtagcgaagaaaagctatcacactaaaggccaggcgatggatttccatattgaaggtatcgcgttaagcaatattcgcaaagccgcgttatctatgcgcgcaggtggtgtaggatattatccacgtagtaactttgtgcatattgataccgggccagcacggcactggtaataattgcttaacgaaacaggggcagtatgaactatcgtattattccggtcaccgcattctcccagaactgtagtttaatctggtgtgaacaaacccgtctggccgcactggtcgatcctggcggcgatgcggaaaaaatcaaacaggaagttgatgacagcggcctgacactgatgcagatcctgctgacgcatggtcatctggaccacgttggcgcagcggcggaactggcgcaacattacggcgtgccggttttcggcccggaaaaagaagatgagttctggctgcaaggcttgcctgcgcaaagtcgtatgtttggtctggaagagtgccagccgctgacgccagatcgttggctgaacgaaggcgataccatcagcatagggaatgtgactttacaggtgttacattgccctgggcatacgccgggtcatgtcgtgttttttgatgatcgggcaaagctgctgatttctggcgatgttattttcaaaggcggagtagggcgcagtgacttcccgcgtggcgatcataatcaactgatttctagtatcaaagataaattgctgccactgggggatgacgtgatatttattccgggtcacggaccattatccacacttggttatgaacgcctgcataatcccttcctgcaagacgaaatgcccgtctggtaaggcacataaaaaagcccgcttttaatgctggcctggatttctggcaaagtgcgctttgtttatgccggatgcggcacgagcgccttatccggcctacaaaatcgtgcaaattcaaaatattgcaggggacgcgtaggcctgataagcgtagcgcatcaggcaatgttgcgtttgtcatcagtctcagcccgcttttcagcgggcttcattgtttttaatgcttacagcactgccacaatcgcttcgcacagcggagccatgttatctggtgtcatcccggccacatttacgcgaccagaagcaaccgcatatacgccaaactcttcgcgcagacgcagcacttgttcttttgtcaggccactgaaggagaacatgccgttctgtttgatgataaagctgaagtcgcggtttgcgcctttttcctgcagcgtattgacgaacaactgacgcatacgctgaatacgctggcgcatatcagtcagctcttgttcccaaatcgcacgtaacgcatcgttgctcaggatggtggcaacaacagaagcgccgtgtgctggtgggttagagtagttagcgcgaatcgccgctttcatttggctgaatgcgcgatcaacggtttcactgtcggcagcaaccagagtacaagcgccaacacgctcgttgtacaggccaaagtttttagagtaggaactggcaacaatcagctctttatgcatagccgcgaaagcgcgcagtccttcagcatcttcttccagaccacgggcaaaaccctggtaagcgaagtcaaacagcggtaaccagcctttctcaacggagagttgtgccagtgtttgccattgttccagcgtagggtcgataccggttgggttatggcagcagccatggaacagcactacgtcgccagcctgagcttcattcaggctgttaatcagtgcatcgaagtcaagagtgtgattttccgcatcataataagcgtattcacgaacttccagacctgcagagttaaagacgctcttatggttcggccagcttgggttgctcacccacacacgcttaacgctggtattttttgccaggaaatcggcagccacgcgtagtgcgccagtgccccccggagtctgtgccgtgcgagcacgtttgtcattgatcagggcgctacctttaccaaacagcagttcctgagtgcagcgaccaaattcagggatgccgtcaatgccgaggtaatttttggtggtttcattttcgagcagatactgttcagcctttttcacgctggtcagtaccggggttttgcccgtctcatctttatagacaccaatcccgaggttaattttgccgggacgttcatcggcacgaaacagatcggccaggcccagaatcgggtcggcaggagcggcggtaatgttctcaaacatgacgaggttccattatggttacagaagggaagtccgctatcagggtaacgggagatttacaaaattccaactattactgatgaaaacgcaggctgtttttgcaagacgtgagattgctctggaaggtataaaaaaaacaggaccaaagtcctgttttttcggcatttaacaaagaggtgtgctattagaactggtaaacgatacccacagcaacggtgtcgtcactacctacgcccagtttgttgtcagaatcgatctggttgatgatgtagtcaacataggtggacatgtttttgttgaagtagtaggttgcgcccacttcaaagtagttcaccagatcaacatcaccgataccttctacgtctttcgctttagatttggtgtaagcgatggacggacgcagaccgaaatcgaactggtattgcgcaactaacagaacgtcttgcgttttgttggcgaagccgctggtgtttgtaaatttattagtgatcggcgtagcgttacgggtttcaccgtagttcgctgccaggtagatgttgttcgcgtcgtacttcagaccagtagcccactgttcagcttttttaccgttgccaagaggttgagcttcttgcaggttggtacggtcagctgcaccataagcaccaacgataccaaagccttcgtattcgtagctgatagaaccgccaacaccgtcgccgttagaacggcgtgcagtgtcacgctcgtttttacccaggtactgaacagcgaagttcaggccatcaaccagaccaaagaagttggagttacgataggtagcaacgccgccaacacgaccaacgaagaagtcatcgctgtatgcagtatcaccaccaaattctggcagcatatcggtgtaacccagtgcatcataaaccacaccgtagttacggccgtaatcgaaagaaccaacgtcagcgtatttaagacccgcgaatgccagacgcgttttgttaccagtttgagcgtcagcgccttcagagttgttaccctggaagttatattcccactgaccataaccggtcagatcggaattgatttgagtttcccctttaaaaccaagacgggcataggtcatgtcgccattgccaccgtaactgttttcaccgttacccttggaaaaataatgcagaccaacagctttaccgtacagatctactttgttgccatctttgttatagatttctgcagcgtttgcagtacctgctactaacagagcagggacgatcactgccagaatattgcgcttcatcattatttattaccctcatggttttttttatgacacctgccactgccgtcaataagttctgtcaataaaaatttacggaactattgatgagagtttggtgtctttatgtgtctgcaggcatctttccattcaaactaacgtttcgctaccgtgaaagtgctacaaagataaagatttggtttcaaaaagaaaaaatatgtaaccaaaagtaaaatttaaggaactttgtgaacaccgtcatatttccatagagacgtgatgatatttacagcaattttaatctatttatatgatttccttatatttaaattaactaaacggaaattttgtttctgatggaaactttatcgacctggcacaaaatcttctttcagacatccagaatgccaaaaaatagtatgaaaattgtgctattagctaagaaaaaactaatccgcaataagaatgcggattagtttttgcgcgtaaatgttgcaatgtaatattccgtaacaggatgatcgttatggcggggttgcaaatagattgcttgacttaacaaacagataacttgacagaaaagataaaaaaagagccagcgggcgctggctcttgaagacgctaaattagaagctggcgttacgcggagtacgtgggaacggaatcacatcacgtacgttttgcacgccagttacgtaagcaatcagacgttcaaaaccaagaccgaaaccactatgcggaacagtaccgtagcgacgcagatcgcgataccaccagtaatcttctttattcaggcccatttccagcatacgctcgtccagcacgtccagacgttcttcacgctgggagccaccaatgatctcaccgatgcccggagccagaacgtccatagccgcaacggttttaccgtcttcgttaaggcgcatatagaacgctttaatatctttcggatagtttttaaccactaccggtgctttaaagtgttcttccgccagataacgctcatgctcagaagagagatcgactccccagtaaaccgggttttcaaacttcctgccgcagttttcgagaatggtcactgcgtcggtataatccacctgcgcaaaatcggcttcaatgaagcgttccagacgactaacggcatctttatctacgcgttcagcgaagaatttcatgtcgtcagcgcgttcttcgagaaccgctttgaagacatatttcagcatggcttcagccagacccgcaatatcgttcaggttagcaaacgccacttccggctccagcatccagaattccgccaggtgacggctggtgttggagttttcagcacggaaagtcgggccgaaggtataaattttggacaatgcgcaagcgtaggtttcgccgttcaactggccagatacggtcaggaaagactctttaccaaagaagtctttgtcgaaatccactttgccctgatcgttacgcggcaggttttccagatccagcgtagaaacgcggaacatttcgcctgcaccttcggtatcagatgcggtaatcagactcgtactaacccagaagaatccctgctcgttaaagaagcgatgcagcgcctgcgccagcgtatggcgaacgcgcgcgacggcaccaatcaggtttgtgcgcggacgcaggtgagcgacttcacgcagatactcaatgctgtggcgttttgccgccatcgggtaagtgtctggatcttcaacccaaccagcaacttcaaccttgctggcctgaatttcaaattgttgcccctggcccgggctcgccacgactttacccgtcacaatgacgctgcagccggtggtcagacgcaggacgtcttcattgtaattgggcagagaattattgatgacagcctgtacaggatcaaagcaggaaccgtcataaacggcgaggaaggagatgccagctttactatctcggcgggtacgtacccatccgcgcacggtgacttcgctgtcaacggctacacggccctggagtacgtcggctacaggcacaacgctcataatattctctctgttaatagtcggaaaaaataaacacttgtccacccgtaaatggggggatacctatgttacctggcatctgcaatcagacaagcagaattcgcaaatgcagcgaaagatttcggaattaaaggtaaaaaaagggagccgattagctccctgatgatattaactggcttttttaatatgcggaaggtcgaacgctttgcgcagcgcccgaacaaacgctttatcatggcagatagttttgccagggctgtcagaaagtttcgccaccggtttaccgttacactctaccaacttaatgacaatattcaggggttttacctgggggatatcgcaggtcaggcgagtcccaataccaaaacttaattgcacgcgggaagagaagtggcggtatagctcaaccgctttgcgtaaatccagattgtcagagaaaaccagcgttttactctgtggatcaattcccagcttttcataatgtgcaatggctttttcaccccattcaaccgggtcgccagagtcatgacgcaggccctgataccgactagcgaactcgacaccgaaatcacgcaggaaagcatccatagtgatgcagtcggttaatgcaatgccaagttggtcgggatactcttccagccaggcagcaagtgcagctcgctggctgttggctagatccgggctgatttgctgatgtgcctggaaccattcgtgtgcctgtgttcccatcggcgtgagggaaagccgacgcgccagatcgtagttgctggtgcccacaaaccaggattcctgttgcagacgcttaacgatggtttcttgtacttcgcgagaaaaacggcgacgggtgccaaaatccatcagatggaagcggctcatatcaagaccggcggttaacgcgctgaagtcgactaatttgctttccagcgtgtcgagggcttgcgcaacgtcggcctgcggactgcgatagcgatgtaccatttcactgataaccgccagcaaaggaacttcccagaggatgacttcacgccacgggccgcttaaacgaatatccagcttgccattatcgttggacacggtgacttgttccgggttaaagcggaactcgcgtaaccagttaagatagtcggccttaaagaaaggcagggcagaaagccactgatattcatcatcctgcaggcgcaggtgctgcatcgcctgaacctgttcacgaatagcatcggcataaatacccagcagatcgtcacctcggcaacgaaactccgccgcgacatgcacatcgtaatagtgatgaaacacggcttgctgcatatgcaacttataagcatctgtatccagcaagctgtgcagaacaggagaagcgaattgtgtcataggtgcgcagtagcgtcctcgtacaggagcgtttagtacaataaacatcttcaggaactgctggagtataccttgtttcgcaatttattgaaccccgatcacaccatatgccacctttctggtcgatggcattacgcggtgtatgttataaaaatgtagcaataaaggcgtttgtacctgaaaagatgaagattctgcatagcgcgatttacgcaacaggaatagactgaacaccagactctataaaagatgctaaaggttatttatgactcaacagccacaagccaaataccgtcacgattatcgtgcgccggattaccagattactgatattgacttgacctttgacctcgacgcgcaaaagacggtcgttaccgcggtcagccaggctgtccgtcatggtgcaagtgatgctccccttcgtctcaacggcgaagacctcaaactggtttctgttcatattaatgatgagccgtggaccgcctggaaagaagaagagggcgcactggttatcagtaatttgccggagcgttttacgcttaagatcattaatgaaataagcccggcggcgaataccgcgctggaagggctttatcagagtggcgatgcgctttgcacccagtgtgaagccgaaggtttccgccatattacgtattatctcgaccgcccggacgtgctggcgcgttttaccaccaaaattattgccgataaaatcaaatatcccttcctgctttccaatggtaaccgcgttgcgcaaggcgaactggaaaacggacgccattgggtacagtggcaggacccgttcccgaaaccgtgctacctgtttgcgctggtggcaggcgactttgatgtactgcgcgatacctttaccacgcgttctggtcgcgaagtagcactggagctgtacgtcgatcgcggcaaccttgatcgcgcgccgtgggcgatgaccagcctgaaaaactccatgaaatgggatgaagaacgctttggcctggagtatgacctcgacatctatatgatcgtcgcggtggatttcttcaatatgggcgcaatggagaataaggggctgaatatctttaactccaaatatgtgctggcccgcaccgacaccgccaccgacaaagattacctcgatattgaacgcgttatcggccatgaatatttccataactggaccggtaaccgagtgacctgtcgcgactggttccagctcagcctgaaagaaggtttaaccgtcttccgcgatcaggagttcagctctgaccttggttcccgcgcagttaaccgcatcaataatgtacgcaccatgcgcggattgcagtttgcagaagacgccagcccgatggcgcacccgatccgcccggatatggtcattgagatgaacaacttctacaccctgaccgtttacgagaagggcgcggaagtgattcgcatgatccacaccctgcttggcgaagaaaacttccagaaagggatgcagctttatttcgagcgtcatgatggtagtgcagcgacctgtgacgactttgtgcaggcgatggaagatgcgagcaatgtcgatctctcccatttccgccgttggtacagccagtccggtacaccgattgtgaccgtcaaagacgactacaatccggaaaccgagcagtacaccctgaccatcagccagcgcacgccagccacgccggatcaggcagaaaaacagccgctgcatattccgtttgccatcgaactgtatgataacgaaggcaaagtgatcccgttgcagaaaggcggtcatccggtgaattccgtgctgaacgtcactcaggcggaacagacctttgtctttgataatgtctacttccagccggtgcctgcgctgctgtgcgaattctctgcgccagtgaaactggaatataagtggagcgatcagcaactgaccttcctgatgcgtcatgcgcgtaatgatttctcccgctgggatgcggcgcaaagtttgctggcaacctacatcaagctgaacgtcgcgcgtcatcagcaaggtcagccgctgtctctgccggtgcatgtggctgatgctttccgcgcggtactgcttgatgagaagattgatccagcgctggcggcagaaatcctgacgctgccttctgtcaatgaaatggctgaattgttcgatatcatcgacccgattgctattgccgaagtacgcgaagcactcactcgtactctggcgactgaactggcggatgagctactggctatttacaacgcgaattaccagagcgagtaccgtgttgagcatgaagatattgcaaaacgcactctgcgtaatgcctgcctgcgtttcctcgcttttggtgaaacgcatctggctgatgtgctggtgagcaagcagttccacgaagcaaacaatatgactgatgcgctggcggcgctttctgcggcggttgccgcacagctgccttgccgtgacgcgctgatgcaggagtacgacgacaagtggcatcagaacggtctggtgatggataaatggtttatcctgcaagccaccagcccggcggcgaatgtgctggagacggtgcgcggcctgttgcagcatcgcagttttaccatgagcaacccgaaccgtattcgtagcttgattggcgcgtttgcgggcagcaatccggcagcgttccatgccgaagatggcagcggttacctgttcctggtggaaatgcttaccgacctcaacagccgtaacccgcaggtggctagtcgtctgattgaaccgctgattcgcctgaaacgttacgatgccaaacgtcaggagaaaatgcgcgcggcgctggaacagttgaaagggctggaaaatctctctggcgatctgtacgagaagataactaaagcactggcttgataaataaccgaatggcggcaatagcgccgccattcggggaatttacccctgttttctcaggcgagtttcagattcaccacgttgcatcacccgttgcaacacctccgcttccagctccgctaatcgcacgctccctaatcgacgcggacgggggatatccactgtcaaatccagaccaatttttccctcttcaattaacagcacccggtcagccatcgctaccgcttcgctcacatcatgcgtcaccaacagtacggtaaagccgtgctcctgccaaagactcacaatcaaatcctgcatctcgagtcgcgttaaggcgtccagcgccccgagcggttcatcaagcaacaataatcccggtcgatgaatcaacgctcttgccagcgccactcgctgtttctgcccgccagaaagtgcggcaggccattcccctgcgcgattctccagtcctaccgcagccaacgctcgacgtgcggcatcgcgccactggcctttaaggcctaacccaacgttatcaatcacgcttttccacggtagcagacgcgcatcctgaaacatcattcgcgtgtcttcctgaatttcagccagcggtgtggtgcccgctaacacatcgcctgcggttggcgtttccagacctgccagcaggcgcagcagggtacttttgccaccaccgctgcggcccaccaccgccacaaactgacctgccggaatatgtaaatccagttggttcaggacgatattttccgcgtaatgtttgcttactgcattgagcaacaatggcgtgccctggttcagacgagcagtattcataccgtggcctccttcaaatgataagccgggttccagcgcaaccagaggcgctctaacagctgcgcgctgacgtcagccagtttgccgagcagggcgtaaagaataatagcgactaccaccacgtccgtttgcaaaaacccccgcgcattcatcgccagataaccaatgccactattggcagaaatggtttcggcaacaatcagcgtcagccacatcaggcccaacgcaaaacgcacgccgaccataatactgggcagggcaccaggcaggatcacatggataaacagcggtatgccggataatccatagctacgcgccatctccaccaacccgcgatcgatattacggatgccatgccaggtgttgatataaatggggaatagcgtaccgagcgccaccagaaagatttttgcggattcatcaatgccaaaccacaaaatcaccagcgggatcagcgccagatgcggcacgttgcgcaacatctgaatactggtatccagcagccgttctccccagcgagatagcccgctaatcagtcccaaaatcaaccccaggcttccgccaatactaaagccaatcagcgcccgccaggagctgatcgccagatgctgccacagttcgccgctggcggagagcgtccagaacgccgtcaccactccttccggactaggcaaaatacgcgtgctcagccagccaacgctggaggccagttgccacaccgccacgatgcccaccggtaaaaaccagggggcaacgcgcaataaccacttcttcactggcgttgccattatttcttccttagctttgcgcgactttacgggggataaaatcattcgccaccgcttcgccttgcggattcagcggctgcggctggggaatttccgggatggcgacatccagaagcgggaacagcaactcgccaacccgatacgcttcttccagatgcggatagccgctaagcacaaaactgtcgatgccaagcgcggcatattcgttgattcgcgcagcgaccgtaggaccatcgcccaccagcgccgtcccggcaccgccgcgcactaagccaacgcccgcccataaattggggctgatctccagattgtcgcgcttgccgttatgtaacgccgccattcgctgttgccctacggaatccgtccgggcgaatgcggcctgtgctttggcgatagtttcatcatcaagatggctgattaaccgctcggcggcctgccacgcttcgtcgttagtttcacgaacaatcacatgcagacgaataccgaaacgaattttgcgtccatgcgcggcagctttcgcccgcacttgttcgattttctctttaaccagttccggcggttcgccccaggtgaggtagagatcaacctgttctgccgccagctcctgggcgacatcactgcttccgccaaagtaaagtggcggatacggctgttgaatcgccgggaagagcagttttgctccgcgcacatgaatatgtttaccgttgaaatcgacggtttctctctgcaataaacgccgccagacctgggtaaattccgcgctggcttcgtagcgctcgctatgatcaaggaacactccgtcgcctgccagctcttgtggatcgctgcctgtgaccaggttaaacaacgcacgtccattactgagacggtcaagcgtggcggcctggcgggcggcaacggtaggactggttacgctgggacgcagggcgacaagaaacttcagccgctgcgtcaccgggatcatgcttgcggcaaccagccacgcatcttcgcaggagcgccccgttggaattagcacaccggtatagccaagacgatccgccgcttgcgcaatttgttgcagataaccgtgatcaaccgggcgactaccttcttccgttcccagataatgcccgtcaccgtgggtcggtaaaaaccagaacatattcagactcataattgttttccttccagttgagtgggctgccagatgcgctggcgaatatcgacttttttcggcaccagacgattttcataaaacagatctgccgtttgctgctgtaaggcggcaacctcggcgttaaccggtttgatggtggtaggagggcgatgatctaagtaagaggcaatcaccggtgccggtaagcccatcgtttttgccagtaaagcgatgctttgctcgcgctggctgcgggttaacgcatcggcctcactaaaggttgccagtacgccctgaataaaagcgccgtttttttctgcatagggacgagctgccagataaaagcttccagtttgattgagatcggtgccgtctttcagcacccgcacgccgccctgtaataatgcagcagagtagtagggatcccagatagcccaggcgtcaacgttaccttgctggaacgcggcgcgggcatcagcgggcgtcaggtaagtgggttggatatcggtaaacttaagtccggcctgacgcagtgcacgcagtaaaaggttgtgactactggaacctttctgaaaggcaactttgtgacctttaagatcggctacggttttgatcgggctgttttctgccaccagaatcacttcggctttgggcttcggtggctcgacgcccacgtacaccaaatcagccccggcagcctgggcaaagattggcggaatatccccggtactgccgagatcaatactgccaacgtttaacgcttccaacatttgcggacccgcggggaactccacccaggagattttactttccggatagcgtttttccagtaactggtggctttttgccagcaccataccaatactgcctttctgatagcctatacgtaacgcttcagggctggattctgcagcaaccgcaaaagtagagacgctaagcaatcccgccagcgccagtttaatgatgttacgcatgggcattacctcgcagagacagaaggtcaggaacctgaacatcgcggcggtgcaatgcctgccagaaagtttctagcgcggtatcaagacgggtttgcagatttggcgtgaactggggtctgtgatggtaatcaattacttgactgtcatcggcaaacacgccgtgcaggatctcctgagctttcagtgcgcttaaaactggtttaagggcataatcgaccgccagcagatgggccacggtaccgcccgtcgccagcggtagcaccactttgccttgcaaagcgcgttctggcagcaggtcgagcagggttttcaacgcaccggaataggcggctttatacacaggcgtggcgacaatcagcccatcggcctgttgcagctgttcggtgaaggtcttgagtgccggactatcgaaacgagcataaagtagatcttccggggcgaagttttgcagattccagtgataaacctctacatccaggccatttagtttttcccgcgcatattccagcaaggagctggagcgagaaggaaagcgaggactacccgccagggtgatgacacgcatactctctccttataaccaattgttctttttttgttaacattgataacaattcggtcagtctgtcggagagacaagaaaattccaaatataaattttgtgtatctttttctgaaaataaactaaagaaagggctttatatatcacgcatatttatttattggatagtcattagatgttgaatcaatgaattactcgttcagttaatatttaaatattcatgaaatctataaattaaagatttgtcacttattggatttagtatgcttgatttaaatggcggacaattattgttattattaagtctaatgtcatttaaaggcattatcatatttacgaagagatcaggatgataacgatgaaaaaaagtgtattgacggcgtttataactgtggtatgtgcaacgtccagcgttatggctgctgatgataatgctatcacggatggcagtgtaacatttaatggtaaagttattgctccagcttgtaccctggtagctgcgacgaaagattccgtggtgactttgccagatgttagtgccacgaagttgcaaaccaatggtcaggtttctggcgtgcaaattgatgtgccaattgaattaaaagattgtgatactaccgtaacaaaaaatgcaacgttcacctttaatggcactgcggatactactcagattacagcgtttgctaaccaggccagttctgatgctgctacaaacgtggccctgcaaatgtatatgaatgatggtacaacggccatcacgccagacacagaaaccgggaacattttgttgcaggatggagatcagacgttgacttttaaagttgattatatcgctacggggaaagcgactagtggtaatgtgaatgcggtaacaaatttccatattaactattattaatagaactcattaattgttttattaattagtacccctccagtgttctggaggggatattcatattttttaagagtgactatttatgaaaacttgcataacaaagggaattgtgaccgtaagtttaacggcaatattactcagctgcagttccgcatgggcggcaggtaaaggcgggattggacttgcagcaacacgtcttgtttatagtgaaggtgaagagcaaattagtctgggtgtacgtaacaccagtccggatgttccttatcttattcagagttgggtgatgaccccagataataaaaaaagtgcagactttattattacaccaccgctatttgtgctgaatccggcaaatgagaatctgttacgcattatgtacattggagcgccgttggcgaaagacagagaaacccttttcttcactagcgtacgggcagtccctagtacaacgaagcggaaagagggaaataccctgaagattgccacacaaagcgtcatcaaacttttctggcgaccaaaaggtttagcgtatcccttaggcgaggctccggcgaaactgcgttgcactagcagtgctgacatggttacggtcagtaacccaacaccttatttcattaccctgacagacctgaaaataggtggaaaagtagttaaaaatcaaatgatttccccctttgataaataccaattttctctgccaaagggggccaaaaatagcagcgtaacgtatcgaaccatcaatgactacggggcggaaacgccgcaactcaactgtaaaagctaagccgtcttcagttaagagagcgagatgtatagaactcatcgacaacacagcctgttaagctctggtggagtgccaagctttattggtgggctggtggtgtttgtgagcgcagcgttcaatgcacaagctgaaacctggttcgatcctgcttttttcaaagatgatcccagtatggtggccgatttgtctcgtttcgaaaaaggacaaaaaataacgccaggggtttatcgtgtcgatattgttctgaatcagacaattgtagatacgcgcaacgtcaattttgttgagataacgccagagaaggggattgccgcctgtttgacgactgaaagcctggatgcaatgggtgttaatactgatgcgtttccggcttttaaacaactggacaaacaagcgtgtgtgccattggcggagattattccggatgccagcgtaacgtttaatgtgaataaactccgtctggaaattagtgtaccgcaaatcgccatcaaaagtaatgcccgtggttatgtcccccctgaacgttgggatgaagggatcaacgcgctattactgggatatagctttagcggggctaacagtattcatagcagcgcagacagtgattctggcgacagctattttctgaatttaaacagtggcgttaatttaggcccatggagattgcgcaacaatagtacatggagtcgtagtagtggccaaaccgcagaatggaagaatctcagcagctatttgcaacgggcggttattcctctgaaaggcgaactgaccgtaggtgatgattatactgcaggcgattttttcgatagtgtcagctttcgtggtgtgcagctggcgagtgatgacaacatgctgccagacagcctgaaagggtttgcgcctgtggtgcgtggtatcgccaaaagcaatgcccagataacgattaagcaaaatggttacaccatttaccaaacttatgtaagccctggtgcttttgaaattagtgatctctattccacgagcagcagcggtgatttgttagttgaaatcaaagaagcggacggcagcgtcaatagctacagcgtaccgttctccagtgtgccattactccagcgtcaggggcgaatcaaatacgcggtgacactggcgaaatacagaaccaatagtaatgaacagcaggagagcaaatttgcccaggccacgttgcagtggggcggaccgtggggaacgacctggtatggtggtggacaatatgctgaatattaccgtgccgccatgtttggtctgggatttaacctcggcgatttcggagcaattagcttcgatgcgacccaggcgaagagtacgctagcagatcaaagcgaacataaaggtcagagttatcgttttctgtatgccaaaacgctcaaccacttgggcactaactttcaattgatgggctatcgctatagcacgagcggtttctacaccctttccgacaccatgtataaacatatggatggctacgaatttaatgacggtgatgatgaagatacgccgatgtggagccgttattacaatttgttttacaccaaacgtggcaaactgcaggtcaatatctcccagcaattaggcgagtacggtagcttttatttaagtggtagccagcaaacttactggcatacggatcaacaggatcggctattacagtttggctacaacacgcaaattaaagatcttagcctggggatttcctggaactacagtaagtcccgtggtcaacctgatgctgatcaggtgtttgctctaaatttttccctgccgctcaatctgttgctccccagaagtaatgatagctataccaggaaaaaaaattacgcctggatgacctctaacaccagtatcgataacgaagggcacactacacaaaacctgggtttaacggagacattactcgatgacggtaacctgagctacagcgtgcaacagggatataacagcgaggggaaaacggctaatggtagcgccagcatggattacaaaggggcgtttgcggatgcccgagtgggctacaactacagcgataacggcagtcaacaacaactgaactacgctcttagtggcagtttagttgcccatagtcagggcattaccctggggcaaagcctgggggaaactaacgttctgattgcagcaccaggcgcagagaatactcgtgtggcgaacagcaccgggctgaaaactgactggcgcggatataccgttgttccttatgccacttcttatcgggaaaatcgaatcgcacttgatgcggcgagcttaaaacgtaacgtggatcttgaaaatgcagtagtcaacgtggttcccaccaaaggggcgttggttctggcggagttcaatgcccatgcgggtgcaagggtattaatgaaaacaagtaagcagggtataccgctgcgttttggcgcgatagcgacgctggacggcgtacaggctaatagcggcataattgatgatgatggcagcctctatatggcgggtttaccggcgaagggaacaataagcgtgcgctggggcgaagctcccgatcaaatttgtcatatcaattacgagcttaccgaacaacaaattaactctgcgattacgcgaatggatgccatatgcagataatctttggagaaaaatgcgtgagtttactacgactattttttgccgccgtcttaatgttatggtgcgctcaaaccgctgcttatagcgggcagtgtcatactactcaggggaatccgtatattggcgtcaattttggcgttaaaaccctggaggaagaagcaaatacggcaggggtagttaaagacaaattttatcagtggaacgaaagcaatgattattatgtttcctgtgattgcgataaagacaatgtcagaagtggccgatgggcattcgccgcggatagtccgttagtctatttaggcgacaactggtacaaaattaatgactatcttgccgccaaagttttattgcaggttaaaggcagttctcctactgcggttcctttcgaaaacgtgggcacagggggggatacccgatggcatatttgcgaccctggcggtcaacgtttaggtgggcagggggcaagcggtaatagcggtagcttttccctgaaaatattgcagccgttcgttggcagcgtcgtcattcctcctatggcgctggcgcgattatatgaatgctacaacatacccgcaggtgattcctgcacgactacaggtacaccggttttagtgtattacctgtctggtacgatcaatagtcttggcagttgttccgtcaatgccggagagacaattgaagttgatttaggtgatgtcttcgctgccaatttccgtgttgtagggcataaacctcttggggccagaacggcagaacttgcaattccagtcaggtgtaacacgggaaacgcgggattagttaatgtcaacctgagtctgacggcaaccacagaccccagctatccccaggcgattaagacgagtcgtcctggcgtgggcgtggtggtgaccgatagccagaacaacattatttcccctgctggtggaacattaccgctctctattcctgatgatgcagacagtatcgcgcgaatgaatgtctatccagtcagcacgacaggtgtaccaccagaaaccgggcgatttgaagccacggcaacggtgagaataaattttgattaacgcgtgaacgtatgaagaaaaaaacgatatttcagtgcgttatcttgttctttagcattcttaacatccatgtcgggatggctgggcctgaacaagttagtatgcatatttatgggaatgtggtcgatcagggctgtgatgtcgccaccaaaagtgcattacaaaatattcatattggtgattttaatatcagtgattttcaggccgcgaataccgtaagcactgctgctgatttgaatatcgatatcaccggttgtgccgctggtattactggcgcggacgtcctttttagcggcgaggctgacacccttgcgccgacactgctcaaactaactgacacaggcggaagcggtggtatggcaacggggattgccgtgcaaattcttgatgcgcaaagtcagcaagaaatcccgctcaatcaggtccagcctcttacgcccttaaaagccggggataacacactcaaatatcaacttcgttataagtccacaaaggcgggagcaacgggcggtaatgcgacggcggttctctattttgatctggtttaccagtgaaggagtgatgttgaaacggataatctggattctgttcttattgggattaacgtggggctgtgagctatttgcccatgatggcacggtcaacattagcggaagctttcgccgtaatacatgcgtgctggcacaggatagcaagcaaatcaatgtgcagttaggcgatgtcagcctgacacgtttttctcatgggaattatggcccggagaaatctttcatcattaatttgcaggattgcggaacagatgtcagcacggttgacgtcacctttagtggaacccccgacggagtgcagagcgaaatgttgtccattgaaagtggtacggatgcagccagcgggctggcaattgcgattctggatgatgcgaagatattgattccgcttaaccaggcgagtaaagactacagcctacatagcggtaaggtgccattaactttttatgcgcaattgcgacctgtcaatagcgatgtgcagagcggtaaagtgaatgccagcgcgacatttgtacttcattatgactaatacgtggaacagattggcgctcttgattttcgccgttttaagcctgctggtggcgggtgaattgcaggcaggagtggtggtcggcggaacgcgatttatctttccggcagacagagaaagcatatctattttactgactaataccagtcaggaatcctggcttattaacagtaaaatcaaccgcccaacgcgttgggccgggggggaagcgagcacagtgccagcaccattactggccgctccgccacttattctcctgaagcccggtacgacaggcacgttgcgcttgctgagaacggaaagcgacatcttgcctgtggatcgcgaaacgctatttgagttaagcattgccagcgtgccatccggcaaagttgaaaatcagagcgtaaaagtggcgatgcgcagcgtatttaaactgttctggcgacccgaaggtttgccgggcgacccgctggaagcttatcaacaattacgctggacacggaatagccagggtgtacaactcactaacccaacgccttattacattaacctgattcaggtgagtgtaaatggtaaagcgttaagtaatgtgggagttgtgccgcctaaaagccagcgtcagacaagctggtgtcaggcaatcgcaccgtgtcatgtcgcctggcgggcgataaatgattacggcgggttgagtgcaaagaaggagcaaaatctgccctgaaacaggttcggaaaacgtttgcgttttttttgccgcaggtcaattcccttttggtccgaactcgcacataatacgcccccggtttgcacaccgggaatccaggagagttcatgtactaccccttcgttcgtaaagcccttttccagctcgatccagagcgcgctcatgagtttacttttcagcaattacgccgtattacaggaacgccgtttgaagcactggtgcggcagaaagtgcctgcgaaacctgttaactgcatgggcctgacgtttaaaaatccgcttggtctggcagccggtcttgataaagacggggagtgcattgacgcgttaggcgcgatgggatttggaagcatcgagatcggtaccgtcacgccacgtccacagccaggtaatgacaagccgcgtctctttcgtctggtagatgccgaaggtttgatcaaccgtatgggctttaataatcttggcgttgataacctcgtagagaacgtaaaaaaggcccattatgacggcgtcctgggtattaacatcggcaaaaataaagatacgccagtggagcagggcaaagatgactatctgatttgtatggaaaaaatctatgcctatgcgggatatatcgccatcaatattagtagcccgaataccccaggattacgcacgctgcaatatggtgaagcgctggatgatctcttaaccgcgattaaaaataagcaaaatgatttgcaagcgatgcaccataaatatgtgccgatcgcagtgaagatcgcgccggatctttctgaagaagaattgatccaggttgccgatagtttagttcgccataatattgatggcgttattgcaaccaataccacactcgatcgttctcttgttcagggaatgaaaaattgcgatcaaaccggtggcttaagtggtcgtccgcttcagttaaaaagcaccgaaattattcgccgcttgagtctggaattaaacggtcgcttaccgatcatcggtgttggcggcatcgacagcgttatcgctgcgcgtgaaaagattgctgcgggtgccagtctggtgcaaatttattctggttttatttttaaaggtccgccgctgattaaagaaatcgttacccatatctaattatttcttcgaattcctctttataagataatcagggctttattttcagccctggttgttttatattcatcgctgttgcttatttagacattttgtacttttattgttgaggttattaagcgaagcgacaatggattgtgttgctgcggttttatagggtaggggagaggcagatgcgaattaaaccagacgataactggcgttggtattacgatgaagagcacgatcgaatgatgctcgatttagccaatggtatgctatttcgcagtcgttttgcgcgcaagatgttgactccagatgccttttctcccgcaggcttttgcgttgacgacgccgcgctctatttctcttttgaagaaaagtgccgcgattttaatttatctaaagaacaaaaagccgaactggtgctgaatgcactggtagcaattcgctatctcaaaccgcaaatgccgaaaagctggcattttgtttcccatggtgaaatgtgggtgcccatgccgggcgatgcggcctgcgtttggttgagcgatactcacgagcaggtcaatttgctggtcgttgaatctggcgaaaatgccgcactatgcctgctggcacaaccctgcgttgttattgcgggtcgcgcgatgcagttgggcgacgccattaaaatcatgaacgacaggctgaaaccgcaggttaatgttgacagcttcagcctcgaacaggcagtttaacgcgccaacttaagtgcagtcttcggtacacagctacagcaaagaatggtgccatcatcgcccattgcactttttttcagcggcgtgacttcgccttctaaaagctgaacacggcaacttccacaaatgcccgcgcggcaagaataagggatacgaattccctgattttctaattgctccagcaacacctgttggttatttccacgaaatgcctgtccctgccagtcaatatctacatttgcgtccggttgttgcgtgatgttggcggtatcatcagcggcagctgcgccgtaaatttttgccggagccgttgccagaatttccacctcatcgccaacgcgaatcacgccgctattacgggcaattaaattctgaccaaaatcgacatcgccgttatcctgggcagtgcggaaagattgcaatgtttttaatggttcgcctgccggatgtttttgccctttttctgggctgacggtggtgaaaatacagcggctacaaggtttaaccacatcaaacaccacatcaccaatgcgaatcactttccagcgatcttcttcccaggcactcgcgccggaaaccaccagattggggcggaattgctccatttttacactggccggacaacgttgttggagatcacgtaagctggcttcgttagcaagaaggtaaggatagccatcagcaaaactcagaggtacagtgttgtggcgtttcacgcgccgggtcatttgtggccccacccagcgtaattgcacttcgcgggagaaaaatccacttagccatttgttgatcgcgtctggcgcaattcgcgcggtaaaatgtgtgccccaaacttcggttggtgcgtcttgtgtggcgaaatcagcaaaacgaacatatgcgctactgccatctggtgcggtgagatgcaagccatcatgcacaggactaggagtaaaccgtaccatctggggaaactggcgagcggtaataaacgtaccgtcaggttccgtgatcataaagatgcgatcgaaggccagaccactgacatctgccagagcatgtgtaagaccaatgccgcgcatgcttttaacaggatgaataaaaagccggattaatgtcgccacggtgcggtcctcaaatgaaaataagccctcaactttatgacatgacgcgcttattagctataatgcgcaacaattttcttagcgcctgtcccattaggctattttatttgtcagtttggccctgggttatgctcgaaatcctcacgtacttgtgtacgctccggtttctccgcgctgtccatgtccagactgactgcaacaattacgcctactgcggtaggctcttagagtaaaagtgacgatatgaattctctgtttgccagtacggcccgtgggctggaagagctgttaaaaactgaactggaaaacctgggggccgttgaatgccaggtggttcagggtggggtccatttcaagggcgacacacggcttgtttaccagagcctgatgtggagccgcctggccagccgtattatgttgccgctgggcgagtgtaaggtttacagcgatttagacctctatctcggtgttcaggcgatcaactggacagagatgtttaatcctggcgcgaccttcgctgtccacttcagtggtttgaatgacaccatccgcaacagtcagtacggcgcgatgaaagtgaaagacgcgatcgtcgatgctttcacgcggaaaaatctgccgcgtccaaatgttgatcgcgatgcgccggatatccgcgttaacgtctggctgcataaagaaaccgccagtatcgctcttgatctgagtggtgatggtttacatctgcgtggctatcgcgatcgtgctggtattgcgccgatcaaagaaaccctggcagccgctattgtgatgcgatccggctggcagccaggaacaccgctgctcgatccgatgtgtggttccggtacgttgctgattgaagcagcgatgctggcgaccgatcgcgcaccaggcttgcaccgtgggcgttggggctttagcggctgggcgcagcatgatgaagctatctggcaggaagtgaaagcggaagcgcaaactcgcgcccgtaaaggcctggctgagtatagctctcatttttacggtagcgacagcgacgcacgggtgattcaacgtgcacgcactaacgcccgtcttgcggggattggtgaactgatcacctttgaggtgaaagatgtcgcgcaactgaccaatccgctgccgaaagggccgtacggcacagtgttgagcaacccgccatacggggaacgtctggacagcgaaccggcgctgattgcgctgcatagcctgctgggtcggatcatgaaaaaccagtttggtggctggaatctctctttgtttagtgccagcccggatctgctaagctgcttgcagctgcgtgcagacaaacagtacaaggcgaaaaacggcccgctggactgcgtacagaaaaattaccacgttgccgaaagcactccagacagcaaaccggcgatggtagcggaagactacaccaaccgcctgcgtaagaacctcaaaaaattcgagaagtgggctcgccaggaagggattgaatgttaccgcctgtatgacgccgatctgccagaatataacgttgccgttgaccgttatgccgactgggtggtggtgcaggagtatgcgccgccaaaaactattgatgctcacaaagcgcgtcagcgtctgttcgatattatcgctgcaaccattagcgtactggggattgcgccaaacaaactggtgctgaaaacccgtgaacgccagaagggcaaaaaccaataccagaaactgggcgagaagggcgagtttcttgaagttaccgaatataacgctcacttgtgggtgaacctgacggattatctcgatactggtctgttcctcgatcaccgcatcgcccgtcgtatgctcggtcagatgagcaaaggcaaagatttcctcaacctgttctcttataccggcagcgccaccgtgcatgcgggattaggcggtgcacgcagcaccaccaccgtggatatgagccgtacttatctggaatgggcagaacgcaacctgcgtctgaatggcctgaccgggcgtgcgcatcgcctgattcaggccgattgcctggcgtggctgcgtgaggcaaatgaacagttcgatctgatctttatcgatccgccaaccttctctaacagtaaacgaatggaagatgcgtttgatgttcagcgcgatcatctggcgctgatgaaagatttgaaacgtctgctgcgtgcaggtgggacgatcatgttcagcaacaacaaacgtggcttccgtatggatctcgacggcctggcaaaactgggactgaaagcacaagaaattacgcaaaaaacgctctcccaggatttcgcccgtaaccgccagatccacaactgctggctgattaccgcagcctgaaaggaatagtaatgagtttaatcagtatgcatggcgcatggctgagcttcagcgacgcgccgcttctcgataacgcagaactgcatatcgaagataacgaacgtgtttgtctggtgggccgcaacggcgcaggcaaaagcacgttaatgaaaatcctcaaccgtgaacaagggctggatgacggtcgcattatttacgagcaagatttgattgtagcgcgtctgcaacaggatccgccgcgtaacgttgagggtagcgtttatgatttcgttgccgaaggcattgaagaacaagcggaatatctgaaacgctatcacgatattagccgcctggtgatgaacgacccgagcgagaaaaatctcaacgaactggcgaaggttcaggaacagctggatcaccacaacctgtggcagctggaaaaccgcatcaacgaagtgctggcgcaactggggttagatcctaacgttgcgctgagcagcctttccggcggctggttgcgtaaagcggcattaggacgcgcgctggtgagtaatccgcgcgtgctgttgcttgatgaaccgacaaaccacctggatattgaaaccatcgactggctggaagggtttttgaaaactttcaacgggacgattattttcatctcccacgaccgtagctttatccgcaatatggcgacgcgcattgttgatctcgatcgcggcaagctggtgacctatccagggaattacgaccagtacctgctggaaaaagaagaagccctgcgcgtggaagaattacaaaatgccgagttcgatcgcaaactggcgcaggaagaggtgtggatccgccaggggatcaaagcacgccgtacccgtaatgaaggccgcgtacgcgccctgaaagcgatgcgtcgcgaacgtggtgaacgtcgcgaagtgatgggtaccgcaaagatgcaggtggaagaggccagccgctccggtaaaatcgttttcgaaatggaagacgtttgctaccaggttaacggtaagcaactggtgaaagatttttctgcccaggttctacgtggcgacaaaattgccctgattggtccgaatgggtgcggcaaaaccacgctgctaaaactgatgctcggtcagcttcaagcggacagcgggcgtattcacgttggcaccaaactggaagtggcttatttcgatcagcaccgcgcggaactggatcccgataaaacggtgatggataaccttgccgaaggtaagcaagaggtgatggttaacggcaagccacgccacgtattgggctatttgcaggactttctgttccatccgaaacgggcgatgacgccggtacgtgcgctttctggcggtgagcggaaccgcttgctgctggcgcgtttgttcctcaaaccaagcaacttattgattcttgacgaaccgaccaacgatcttgatgtcgaaacgctggaactgctggaagaactgatcgacagctatcagggcacggtattgctggttagccacgatcgtcagtttgtcgataacaccgttacagaatgttggatcttcgaaggcggcggtaaaattggtcgttatgtcggcggttatcatgatgcccgtggtcagcaagagcagtatgtggcgctcaaacagcctgcggtgaaaaaaaccgaagaagccgccgcggcaaaagcagaaactgtaaaacgcagcagtagcaaactaagctataaattgcagcgcgaactggagcagctaccgcaattgctcgaagatctggaggcgaagctggaagccctacagacgcaagtggcggatgcttccttcttcagtcagccgcatgagcagacgcaaaaagtgcttgctgatatggctgctgcagagcaggagctggagcaagcctttgaacgctgggagtatcttgaagcgttaaaaaatggtggctgatcgcaaaatagtcgatttaaacagagacagctgacaacggtaaaattgcctgatgaactgggtttatcaggcatgaaaaccaacactttgttagtcatctgtaaaatagcgcatcattaaggagtaccaatgtgcgaacatcatcatgccgcgaagcacatcctgtgcagccagtgtgacatgctggtggcgttaccgcgccttgagcatggtcagaaagcggcatgtccccggtgtggcacaacgttaaccgtggcgtgggatgcccctcggcagcgtcccaccgcctatgcgttggctgcactgttcatgctgttgctgtccaacttgtttccttttgtgaatatgaacgttgcaggagttaccagtgaaattacattactggaaattcccggcgtgcttttttctgaggactacgccagcctcggcacctttttcctgttgtttgtgcaactggttcccgcgttttgtctgataaccattctgttactggtgaatcgcgcggaattaccggtccgtttaaaagagcaactggcacgggtgctttttcaactcaaaacctggggaatggcggagattttcctcgcgggtgtgctggtcagtttcgttaaactgatggcttacggcagcattggggtaggcagcagctttctcccctggtgtttattttgtgtcctgcaactgcgcgcttttcagtgcgttgatcgtcgctggttatgggacgacatcgccccgatgccagaactgcgccagccgctaaaaccaggcgtcacggggatacgtcaggggctgcgtagctgctcctgttgtacggcaatccttcctgctgatgaacccgtgtgcccgcgttgtagtaccaaagggtacgttcggcgtagaaacagcctgcagtggacactcgcgctgcttgtaacgtccatcatgctgtatcttccggctaatattttgcccatcatggtgacggatttattaggcagcaagatgccgagcacgattctcgctggggtcattctgttatggagcgaaggctcttatcccgtcgctgcggtgatctttctggccagtattatggtgccaacgttaaagatgatcgccatcgcgtggctgtgttgggatgccaaagggcatggcaagcgcgacagtgaaagaatgcatttgatttatgaagttgttgagtttgtaggccgctggagcatgattgacgttttcgttatcgcggtgctcagcgcgctggtgcgtatgggaggtttaatgagtatttatccggcaatgggtgcattaatgtttgctttagtcgtcataatgacaatgttttctgctatgacgtttgacccgcgtttgagctgggatcgtcaacctgaaagtgagcatgaggagtcctgacagtatggaatctaataatggggaagccaaaatccagaaagtgaagaactggtctcccgtgtggatatttcctatcgtcacggcgctcattggggcctgggttcttttttatcattacagccatcagggaccggaagtgaccctgatcaccgcgaatgcggaaggaattgaaggtggcaaaaccaccattaaaagccgtagcgttgacgtcggcgtggttgaaagcgccacactggctgatgatttgacgcacgttgaaatcaaagcgcggctgaattccggtatggaaaaattgctgcataaagacaccgtcttttgggtggtgaaaccgcagattggtcgcgaagggattagcggcctgggaacgctgctgtctggagtttatatcgaactgcagccaggcgcgaaaggcagcaaaatggataaatacgatttgctggacagcccaccgttggccccgcctgatgcgaaaggtatccgtgtgattctcgatagcaaaaaagccgggcagctcagcccaggagatccggtgctgttccgtggctatcgggtaggtagcgttgaaaccagcaccttcgatacacaaaaacgcaatatcagctatcaactgttcatcaatgcaccttatgaccgactggtgaccaacaatgttcgcttctggaaagatagtggcattgcggttgatctgacgagtgcagggatgcgtgtggagatgggcagtttgacaacgctgctgagtggcggtgtcagctttgatgtgccggaaggtctggatttagggcagccagtggcaccgaaaacagctttcgttttgtatgatgatcagaagagcattcaggatagcttgtacaccgatcacattgattatctgatgttctttaaagatagcgtacgcggtctgcaaccgggagctccggtagagttccggggtattcgcctgggtaccgtaagcaaagtgccattctttgcgccgaatatgcgtcagacatttaacgatgattaccgtattccggtactgattcgtatcgagccagagcggctgaaaatgcagcttggcgaaaatgcggatgttgttgagcaccttggcgaattgttgaaacgtggtttacgcggaagcctgaaaaccggaaacctggtcactggtgcactgtatgttgatctcgatttctatccaaatacgcctgcaataaccggtattcgtgaatttaatggttatcagattatcccgaccgttagcggcggcctggcgcaaatccagcaacgactgatggaagcgttggataagatcaacaaactgccattgaatccgatgattgaacaggcaaccagtacgctttctgaaagtcagcgcacaatgaaaaacctgcaaacgacgctggatagcatgaacaagatcctcgctagccagagcatgcagcagttgccgacggatatgcagagtacgttgcgtgaattgaatcgcagcatgcagggcttccagcctggctccgcagcctacaacaagatggtggcggatatgcagcgccttgatcaggtgttgcgagaactgcaaccggtgctgaaaacgttcaatgagaagagtaacgcgctggtatttgaagcgaaggacaaaaaagatccagagccgaagagggcgaaacaatgaaaaagtggctagtgacgattgcagcactgtggctggccggatgcagctccggcgaaattaataaaaactattaccagttacctgtggtgcagagcggtacacaaagtaccgccagccagggcaatcgtctgttatgggtagagcaggtcactgttcctgactatctggcggggaatggtgtggtttatcaaaccagtgatgtgaagtatgtgattgccaacaacaacttgtgggccagcccgttggatcaacagttgcgcaacaccctggttgccaacctgagtacgcaactgcccggctgggtggttgcctcccagcctctgggaagcgcccaggacacgctcaatgttaccgtaacggagtttaacggtcgctatgatggcaaggtcattgtcagtggtgagtggctgttgaaccaccagggacaactgatcaaacgtccgttccgtctggaaggagtgcaaactcaggatggttacgatgagatggttaaagtgctggccggtgtctggagtcaggaagccgcttctattgcacaagagataaagcgtctaccttaattataaagatttgtaaatataaccgtctccggtatgttgcctgaggcggtttttttgtctctaacgtgcggaaaaatttgttcctcttcacattttttgtacaaccgacatgcccgtgtagctcacaaatatgacagtggcgtgaattttgcgcattgacggcagttatgattcgcggtattgcttaactgtgattgcacatttagtaatcactgttttcttttccaccagaaaccagtatgagggaaacgaggcatgaagagacaaaaacgagatcgcctggaacgggcacatcaacgtggttatcaggccggcatcgccggacgcagtaaagaaatgtgtccctatcagacgctgaatcaaaggagtcaatggctgggaggctggcgagaagccatggcggacagggtagtaatggcctgattctgtctctttaaaaagaaacctccgcattgcggaggtttcgccttttgatactctgtctgattataatcagaaggcagacgtatcctggaacagaccgactttcaggtcgctggcggtatagatcagacgaccatcaaccagcacttcgccatccgccaggcccataatcagacgacggttaacaatgcgtttaaagtgaatacggtaggtcacttttttcgctgtcggcagtacctgaccagtgaatttcacttcgccaacgcccagcgcgcggcctttaccttcgccgcccagccagccgaggtagaaccctaccagctgccacattgcgtccaggcccaggcatcccggcataaccggatcgccaataaagtggcatccgaagaaccacagatccggattgatatccagttctgcttcaacataccctttgtcgaagttaccacccgtttcggtcattttgaccacacggtccatcatcagcatgttcggtgctggcaattgcgggcctttagcgccaaacagttcaccgcgaccagaggcaagaaggtcttcttttgtataggattcgcgtttatctaccatgttctctgtaagccttattttattgaagcacgcaggatagctaacacgtgtacgctgaacaagtccgatcagttcggaataaaccagttcagccaacgtaatggccatggaaaacggtgacgtccttcctgttggcttgcttgcgcgatacgttcctggatggtttgcatcagcgtcgtttggccttcgccatcccacaccagatttaataataacggcagtgcgtcagtcacatcgtctactgcccagatggtgaatttgccttcttctaccgctttcaccagttcactgtgaagacttaaatggcgaacgttagctgtggggataatgacaccttgtttcccggttaactcacgttgctggcaaatagcaaagaagccttcgattttctcatttaaaccaccgaccggctgggcgcgaccgaactgatcgacactacctgtgatagcgatactctgattcaccggcacatcggcgagggcgcttatcagggcgcagagttcagccatgctggcactatctccatcaacttcactgtaactctgctcaaatgtcaggcttgcactgaaggggatctgttgctcaagctgtagttcgctcatcaggaacgcttgcatgatcatcatccctttcgcatggatattgccgccaagctccgctttgcgttcgatgtcggtgaattcaccatcgccaatatgcacaacgcagctaatgcgagaaggttcgccaaaagcgcgtggatgacccggaaattcaatgacgctaagggcgttaatttgcccgatgcgttcgccttcggtttcaatcaggatttgctcctgaaggatctcatcctgcatacgttcagcgaggaaaccttcgcgccattcacgctgctgcagcattaagtttagctgctcgccggagaaggtgtcgccatcacacagggaggcgacctctttacactggcggaggatccactgcgggctaagcggaagtgtttcttgttcaccggtgtagcgtgctgcttcgcggataagtatcggccaggcatccgctcccggtgcaggtaagtgattatgtctggcggtaaatgtcacccagcgacaccactgggttacactctccgcatcgacaatctgcagagtatcttcaaattcgctataaatagcctgctcactaagctctggctccatctcctggaaatcagccaaactttcgcgttcgcctaccagaatgactttcagcttcaatggcatgctaggcacagagacggggagagggcggctctcatcaaacgcaacccagtcaaaacgctcgcggttaacgatatttttcagccgcatccacagcagaggttgcgccagcagtgtacgcaaagagataatgagaataccgccatttgcctgatgcaccagaccaggctgcagggtaatgtcgccattaaactggcgcaggcagccaaagagttgctccgcttctacccagtcggcagcgacaacttgcgttaaagtcgcaaaattatcatctgcactcactgcgtgacgtaagcggatggagtggccggaaacctcatagtgaccgcccaccagttggcctgcatcgctttgtagcgtacgcgcggcattggcaataagattcagatactcagactcttccggggccttcgccagcataaaagaggaggatgctcgcgtatgcagcaactgctccagcgcaaattgcagccgcggttgagtatcactgaataaaggatcgttttcgtcaatcaaatgtggctgagcaaatatttcctgatagctatcggtatcaggaaccaggtcacgccatgcaagtttcgtaatggtcaaagttgatgttttttagtctgttgtcaaagccgcgattataccgtaaccggcactacagcacacgtagaaagcaccgacaatactcctggcatgggcgttaaagctcacaggatggagattcttttcttcactggcctaaaaagctgatattctgtaaagagttacacggtaacattgagatcgctatgaaatatcaacaacttgaaaatcttgaaagcggttggaaatggaagtatctggttaagaagcatcgcgaaggggagttaatcacccgttacatagaagccagtgccgcccaggaagccgtcgatgtgttgctcagcctggaaaatgaacccgtgctggtaaatggctggattgacaagcatatgaatccggaactggtcaatcgcatgaagcaaaccattcgggcaagacgaaagcgccattttaatgcggaacaccagcatacgcgcaaaaaaagcatcgatctggaatttattgtctggcaacgtctggctggtcttgcgcagcgtcgcggtaaaacgctttctgaaacgattgttcagctgattgaagatgcggaaaacaaagagaaatacgcgaataaaatgtcttctctgaagcaggatctgcaggcattgctgggtaaggaataactgacgaaagtcagttcaatttactaaaggcaaaaaaaaccccgcagcagcggggtttttctaccagacgagaacttaagcctgcggctgagttacaacgtctttgatacctttaacttcgatctctacgcgacgatccggagccaggcagtcgatcagtgcagcacgctgtttcacgttgtcacaggtgttgccagtaaccgggttggattcgcccataccacgtgcggagatcttgtctgccgggatacctttggagatcaggtaatcaacaacagactgagcacggcgctcggacagaccctggttgtaagcgtcagaaccgatgcggtcggtgtaacccagaacaactacggaaccgtctttcggatccaggttgctcagctggctgtacagctgatccagagcagcctgaccttccggtttcagggttgctttgttgaagttgaacagaacgtcagacttcagagtgaagtgcttggtctgtacttccggtgccggagctggagccggagcaactactggagctgcttcgccctgaccgaaacggtaggaaacacccaggctcagcatgccgttgtccggacgagtgccgatggtgtgtgcgtcaccgatgttgttggtccactggtattccagacgggtagcgatttcaggagtgatcgcgtactcaacaccgccagcgaagaccggagaaacgccggtgtcgtggtttttaccataaacgttggatttagtgtctgcacgccataccatgccacccagacgagtgtagatgtccaggtcgtcagtgattgggtaacccagtttagcggtcagttgaacgccctgagctttgtatgcaccgttttcaacgctgcctttgtacggcatacgacctaaccagtcgtaacccatttcaaagccaacatacgggttaacctggtaaccaccaaaagcaccagcgcccagttggttttcatgggtcgggccattgttgttgatgaaaccagtgtcatggtactgggaccagcccagtttagcaccagtgtaccaggtgttatctttcggagcggcctgcgctacggtagcgaaaccagccagtgccactgcaatcgcgatagctgtctttttcattttttgcgcctcgttatcatccaaaatacgccatgaatatctccaacgagataacacggttaaatccttcaccgggggatctgctcaatattaactctaccgatatcttcggcttatgccgagcacccctggcgatgtaaagtctacaacgtagttgaaaacttacaagtgtgaactccgtcaggcatatgaaaaaaaagtcttgtataaggtatgtttaatcttttttgtcagcgacaatttacagaagagaatcgcggaaaccgcttcagacaagcctccgcaaggaaaattagtcacgactgaaagcattggctgggcgacaaaaaaagttccaggattaatcctaaatttacttaatgatacaaattagagtgaatttttagcccggaaagttgtctcgtggcgtgagaggatgcgcttaccggacgcataataaaccccatagcgttaccttcatttgccgcatcaacaagttcagcatgctcttcttcagtcaaatcatctgccaaccaaccgatcaccacactgtaattgcccgtgcgtaaagcgcgaaccatactctccacagtgtggcaaggggagagctggctaatctgcattactttcgttaagggtagcccagatgcctgaacccattcccgactcagtttttgttgcggtgttaaccagagttgccagcggctttgctgaccgagttgctgtaacaatggcaacagtagaagttgcgtcatcatgggctgatcttcgcgatagacaacttcactgataagcccggctgtagtgttttccgtagagacacgcgcaattttacttgctgcggaactgaagctgctagaacgatgtgcatagccactagtgtacataatcaatccagcccctgtgagttactgtatggatgtacagtacatccagtgacaacaaagatcaaccctattttcggaaagagcctcgcaaattttgtcgttggtgacgggaaaacataaattaatcttgccccttaagaataagttgcctattttcgtagttaacggatccgttaatgtgaatcattcttttatgttatgattttaaaaggaattttatgaaaagcctctcctataagcggatctataaaagtcaagaatacctggcaacgttgggcacaattgaataccgaagtttgtttggcagttacagcctgaccgttgacgacacggtgtttgcgatggtttctgatggtgagttgtatcttcgggcttgtgagcaaagtgcacagtactgtgtaaaacatccgcctgtctggctgacatataaaaagtgtggccgatccgttaccctcaattactatcgggttgatgaaagtctatggcgaaatcaactgaagctggtgcgtctgagcaaatattctctcgatgcagcgctgaaagagaaaagcacgcgcaatacccgggaaagactgaaagatttgcccaatatgtcttttcatctggaagcgattctcggggaggtggggattaaggatgtacgggcgttacgtatacttggggcaaaaatgtgttggttgcgactgcggcagcaaaacagtctggtgacagaaaagattctgtttatgcttgaaggtgccattatcggcattcatgaagctgcgctcccggtggcacgccgccaggagcttgcagaatgggctgactctcttacgccgaaacaggagtttcctgcggaacttgagtaattacgcgctaacaggagtttcctgcggaacttgagtaatctggcgttgcagacgaccaatctcaggcagtaatgcaatcaataatccaacttgttgtacgaccagaggttctttgctgtctgcccgtggttcaagttgctgcatccgctgtttcaggctagctaatgcctcattgacgcgttcttcatcagcaggttgatgatgtaacgcgtcatcaacatagcaaactgcgtcatcaagaaacgccagaatttcaggattagttaactgctcccggtgagcaccgagggcactgatatagctggtaaacgtatggttaaggcacagcaaccgaaacgcggcttcgcgaatttgcggggtaacgttcggctcgctggacatattacttaccacgctcgccagctcagcatcacggttgtgtgcatcgcggcgggcaatacgatacgccagacggttatcacgcccctgatggtattgctccagtatggcatcgagataccgacagttggcctctgtggcacgttcgagcatgcgcggcagattgcgaaactgccagtcaggccagatgtagctcactgccgcccacgcaatggcacaaccaatcagcgtatcgattacgcgaggtaacgctacttcaaaaccttcacccagtaagttaaaacacagtagcaccaaaagtgtgatgaacatcgttgcatgagcgtattgcacgttacggaaggcaaaaaagagcacgccggtaataaccagcagcaccagctgcccttccagacttggcacaaaccacagcacaggaatgccaatggcgatacctaccagcgtaccaataatccttaacttcaggcggtggcgcgtggcgttatagtttggctggcagacaaacaaacttgtcagcaagatccaatacccgtgatgcattccggttatctgaatgatggcgtagccgaagcacaacaccaggctcattcttaccgcatgacggaagagggcggattccggcgtgaagtgacggctaagacgcagccagatatcactcaacccgtgcgggctgtcatcagcgagctcattttcgtcattattatggggtagtgcctgggcctgttcactttcaattgttgccagttgggcatcaatggcgcgtaaattgttcagcaaaaatcccagtgttttgagtaaatcggcgggtgcgccgttatcgcgcatccgctccagcgcagcatcaatatgcgtaaaagcgcgctcaaaatgcggatcatgttgataaggctgacgcaacaaaatacagcgactcagttgctggcacgcctggccctgcatgctcatcagccgctgaaaacggaacagcacgtcgctgtggcgaaaatgttcacgcaatgtttgatactgaatatgagaagagctggcacgctcgtgaatatcctgtgcgacaaagtaataatgcagcgtgcgacgcgttccccgttgaccacgatcgccacgtaagcgggtcagcaggctgagtttcgtctgattcaatgtcgccatcagcagaccgttggcgagagccaaatcgtacagcggtgcctggctttgatcttcaatatcaggatcaaacatgcggctcttgagctcaagataacgcgccagttgttcatagcaacgcgccaggttgtcctgcagcgggcggaccgggaacagcagatgaccaataagtgtcaggacgttgtaccagacggcaccggccagcagatacatcggctgctgataccagtgctcatacagacttgttcccaacatagtgtaaatggcgatcagcaatgcaccgaaggcaattgttgcatagcgttgacccagaccgccgagcaaaatgaagccgctggtagagagcgttaagccaatcgcaaatagccagggccagggaaacagcaattctacactggcgctggcgataaaaaagcagaacagcgtaatgatgaggttacgcaaacgtcccgccagtcggtcatcgagatcggtcagcgccgctgccaccatccccagcgttagcggaatcgtcagttttacatcacccagccaccacggaaacgctgtggttccacaaagcgcaataaaaatacgcgcgtaatacagccaggcgctgttccaggtatagcgtttgagcaaaggacttagcataaaggccatattagtggattattcaaaacgacgacgtgcattggcttcacgcgcagcttgcgctgtttctacgcttaccacgcgacgaccaaccggccatagtgcaatagcggcaattttaaagttcgcaatgccgacaggaatgccaatgatactaatacattgtgcgatgcccgttgcaatgtgcatcaggcataaccaccagccaaagaaaatcagccagaaaatattcaataccgtaccgccagtattcagcagcacatttttgccagccgggttcagttcatcgacatgaatagcttcattgccataaggcaccagagacagtttagtgatctcccagcaggatcgtgtcagcggtaaggtaaaaatcagcacaatactgaccagagtcgccaacagccagcccagagtggtggcaaatccgccaagcacaaagttcagaatgttcaaaacggtacgcataaaacctcgctttactgtggttttcagtaatgggcggcaattgtaacgtttttttgggctggagcacgttttctctgacggttacactgataagaaataatttcgtgtggatctacagagtcatggaactgaaagcgacaacgcttggaaaacgtctggcacagcacccttacgatcgggcggtgatcctcaatgccgggattaaagtctccggcgatcgccacgaataccttattcctttcaatcaattactggcgattcactgtaagcgcggtctggtatggggcgagctggaatttgtactgccggacgaaaaagtggtgcgtctgcacggcaccgaatggggcgagacgcagcgtttttaccatcatcttgatgctcactggcggcggtggagtggcgagatgagcgaaattgcgtctggtgttttacgccagcaactggatttgattgccacgcgcactggggaaaataaatggctgacgcgtgagcaaacctctggcgtgcagcaacaaatccgccaggctttgagcgcgttgccgttgccggttaaccgactggaagaattcgataactgccgtgaggcgtggcgtaaatgtcaggcctggttgaaagatattgaaagcgctcggttgcagcataaccaggcgtataccgaagccatgcttaccgagtatgcggattttttccgccaggtcgagtctagtccgctgaatccggcgcaggcccgggcagtcgttaatggcgagcattctctgttagtgctggcaggtgcaggaagcggaaaaacgagcgtgctggtggcccgtgcaggctggttgctggcgcgtggtgaagcgtcccctgagcaaattttattgctggcgtttggtcgcaaagccgctgaagagatggacgagcggattcgcgaacggctacataccgaagacattaccgcacgcacgtttcatgcgctggcgctgcatattattcagcagggcagcaaaaaagttccgatagtcagcaaactggaaaatgataccgctgcccgtcatgaactctttattgctgagtggcgcaagcaatgcagcgaaaagaaagcgcaggcgaagggctggcggcaatggctgacggaagaaatgcagtggagtgtgccagaaggtaacttctgggatgatgaaaaattacagcgtcgccttgcctctcgcctcgatcgctgggtaagtctgatgcggatgcacggtggtgcacaggcagaaatgattgccagtgcacccgaagagattcgcgatctgttcagtaaacgtatcaagttgatggccccgttattaaaagcctggaaaggtgcgctgaaggcagaaaacgctgtcgattttagcggccttattcatcaggcgattgtgattctggagaaaggtcgctttatcagcccgtggaagcatattctggttgatgaatttcaggatatcagcccgcagcgggcagcgttgttagcggcattacgcaagcaaaacagtcagacgacgttgttcgctgttggtgatgactggcaggcgatttaccgattcagcggtgcgcaaatgagcctcaccaccgctttccatgaaaactttggtgaaggcgaacgctgtgatttagacacgacttaccgttttaacagtcgtatcggtgaggtggcaaaccggtttattcagcagaacccaggccagctgaaaaagccgctaaacagcttaaccaatggagacaaaaaagccgtcacgttattggatgagagtcaacttgacgctttgctggataagctctctggttatgccaaaccggaagagcgcattctgatcctggcgcgttaccatcacatgaggcctgccagcctggaaaaagcggcaacacgctggccgaagttgcaaatcgactttatgaccattcatgccagcaaagggcaacaggcggattacgtcatcatcgttggcttgcaggagggaagtgatggttttccggctgcggcgcgggagagcattatggaagaggcgctactgccaccggttgaggatttcccggacgctgaagaacggcggttaatgtacgtggcgctgacccgggcacgccatcgggtatgggcactgtttaacaaagagaatccctctccctttgtggaaatactgaaaaatctggatgtgccggtggcgagaaaaccgtaagaaacaggtggcgtttgccacctgtgcaatattacttcagacggtccgcgagataacgctgataatcggggatcagaatatcgaccgcgtcgttgaaatgcgggctctggattatgaagtctgccgttgccacgttggtggcgaccggaatgttccataccgtcgccagacgcagcaaggctttcacgtcaggatcgtgcggcacggcatttagtggatcccagaagaaaatcaatacatcaattttcccttcactgatcaatgcgccaacctgctggtcaccccccattgggccactcaacatcgcgttgacgttcatgccggtcgcgcgggaaattaagttaccggtagtgcctgttgcatacagtacgtgttgttccagtaacggttgatgccgttccacccagctcatcagcatttgtttgcagtgatcgtgtgccaccagcgcaatatgtttccgcgcaggtaaagtgcgagtcgtcagttccataatgtacatccgtagttaactttcctacagattactgtaagcacttatcgctgcaagataaagaccgaaaaagcctgcgcacaggcacaaaaatctcaggaagatggttgtttttccgcccactgcaggaaagtatttcgcgtttgtgggtcagccagtttaaaccaatacttcagccgttgttctgtgagcacctgagactgcggtggaatagcatccagctcggaaacaccgctaagcagcgtactgtcatctgccatcatcgtggcaaattgcggtagactagcgcgtttcgcggatttgttatagcgttcaacctcgacctcataatcaatcgtttttgccgtactggtaatggcgagaatatccagctttaccggaatcggcgtcgcatcgccatccaacaattcaaggcgcggcgcggcatcaaaatggttagcttcccgctcattctccaggcgaggcaggcgaaaattgacctggttgatgagctgggtattaaaactgaccaccagcggtggggagatatacagccgttcttcactattggaaagatgaatcgtcttctcaacgcgaaacactaactgatgcggtccattatccagttcaatgctgtccgcaccgcgcagcagagagctggaaaccttcttgccgtcgagtaccagaagatcgacatcggtactaagccgcagcgtggtggcaaaaacggataccggcaaacataatgcaatcaaggtggtcacgatgccggttttcataggtagctcctgtcaaaagaccgcccgaataataatgtgtcaaaatttttctttaatcatacttactaacatatagacatatttcccgcttttgctctcattcattcgtattagctgcatggttggcatgtcggctttgtcgtacactttgttaaacagtctggaggaaataatgaaagaaaccgatattgcaggcattttaacgtccactcacaccattgcgctggtgggggcaagcgacaaacccgatcgtcccagctatcgcgtgatgaaatatctactcgaccaggggtatcacgtcattccggttagcccaaaagttgccggcaaaacgctgctgggccagaaggggtatggcacgctggcagacgttccggaaaaagtcgatatggtcgatgttttccgtaatagtgaagcggcgtggggcgtggcacaggaagctattgccattggcgcgaaaactctctggatgcaactgggggtgattaatgagcaagcggcagtactggcacgggatgccgggttaaatgtggtgatggatcgctgcccggctattgagatccctcgcctgggcctggccaaataaaaaatccccggaaggcaaaaaccttccggggatttgttcagggattagttacgcagacgcggggcctggagttgtttgcggatggtctgcgccagctcatccatggatggctgttcaggatgttcatcctgcaattcgctacttagctgggcttcagccaggtaggtatgaaccggtaggccgttatcgtcctccatcactacgtgataccacggagcggcgcgaagctcgtcattcaccgccagctcatcagggctcggttcagagaggctataaaccgggtcgatatccacgaccactccgagataacctaacagggaatggcggacctgctggccgataccgaatttgctggcaatcatagtcacctcccgggaaatctttacctttgatataagggtaaaattccacatttcaagttacatgacgcgacaggcaaaccctttcagatatagcccttccggataggtagcgatcaccggatgatcggctgcctgacggaactgctctataaattgtacatcacgaccggcatcaattgcggcatccgcgatgattttctgaaataaatcgctggtcatcagaccggaacaggagaaagtcaggagaataccgccttcattcagcagctgaatcgccagcatgttgatgtctttataaccacgacacgcgcccatcaactggcttttattctcaacaaacttcggcgggtccatcacgataacgtcaaatttttcaccgcgatcgcgataagtacgcagcaatttaaagacatcatcacggacaaactcagccttgctcagatccagtttgttcagctcaacgttctgccgtgcaatatccagcgcttcctgggaggtatcaacgctgacaacctggctgcaaccgcccatcagtgcgcttacggcgaaaccaccggtataggagaaacagttcagcacacgtttattttcaacgtagcggcgggtagccaggcggctatcacgctggtccaggtagtagcccgttttgtgtccgtgctgaatatccaccagcagtttcattccgtgttcttcaatcggcagcagggcaggtggcaactcgccggtgacggggccctgggtcagctccattccttcttttttacgtaccgcgacgtcgctgcgatcgtaaatgctacattccgggtacagcgtttgcagggcactaattaatgccgcgcgctgatattctgccccagcactcagcagttgcagcaccagaaaattaccgaaacgatcgatagtaatacccggcaggccatcagattctccggcgattaaacgatagctgtcgaggccatctttttgcgccagccagtcacgccatttttgtgcttgttgcaaacggcgggaaaaaaaagcaatgtcgatagactcagacgggtcaaacgtccagacgcgcgcccggatttggctagctgggctataagcgccgcgtgctaaccattttccctgatgatcaacaatatcgatggtttcaccgaggctggctttaccttccatgcgggcaacggccccggaaaagacccacggatggcgacgaagtaatgatttttcgcgccctttggctaacactaaacgtacactcataatttacttttctgtcgatgcaaagaaatgggcgtcattgtccggagttttccatggatttgcaacgcgtccattaaggataaggagagcagcaatgagcaaagtctgcataattgcctgggtttacgggcgagttcagggcgtaggatttcgctacaccacacagtacgaagcgaaaagactgggtttaaccgggtacgccaaaaatcttgacgatggcagcgtggaagtggttgcttgcggtgaagaagggcaggtggaaaaattaatgcagtggttaaagagtggcggcccgcgttctgcgcgtgtagaacgggtgctcagcgagccgcatcatcccagcggggaattaaccgattttcgtatccgttaaatacattttaccggttttggcaggccagcaattttggtggcttgcttagccggacctttcggaaacagtcggtataaatagcggctgttacctttttcttcgccaaatttattcgccatcgcttttaccagcatacgaatcgccggagaagtattgaattccagatagaaatcacgcacaaaacgcaccacttcccagtgttccggactcaggctaatcccttcgttctctgcaatcaccacagccagcggctcactccactggctgctttctttgagatagccttcggtatccgtttctatctctttaccttcgaagatcagcataattattactaccttaatcagactggcggcagtgtaacaaaaaacaaagccccgcataaagcgaggctatgaaagtgttagcgggtgagattaatcgcggctagcgaagcccagaatgctcagcaggctgacgaagatgttgtacaggctaacatacaggctaaccgtggcacgaatatagttcgtctcaccgccatgaatgatgttgctggtttcaaacaagatagcgccagaggagatcagaatgaagaccgcgctgatcgccagatgcagagcaggcagctgcaggaagatattcgcaaccataccaatcagcaccaccacaatacccgccatcagcataccgccgaggaagctcatatctttgcgggtggtcagcacatatgcagagcagcagaagaacactaacgccgttccgcccagtgccatagcgattacgtcacccattccggcagacagataggtgttcagaataggtccgaggatataacccagaaaaccggtaaaggcgaatgcggagataatcccggtcggcttattcgccgttttataggtcaggaacatcaaaccatacatacccaccagcgtcagaatcagacccggagatggcagcatcagcaccgtactggcagttgcggtaatcgcgctaaaggccagcgtcaggctcagcagaaaataggtattacgcagcaccttatgggtgctaagcagacttgtacggtcatgactagaactaacaatacgatccattgagtcactctctatgacagatgtaattaattaagcagcataatgataatgcgtaagggcacccagaagttttacccatctttacgcatttgatctggaacaggtttaacagcggattatcaggtcattaagcaaatataacgccctgagaatttcgacaggcaaaagaaaaaggggttagcatttagctaaccccttatcttattggaatgacgcgcactataaacatcccgatgcggcgtgtaaacccctaatttgtttgtttgcctgaaaaacagccaaaagtgcattgatagcgtgaaataacagcagattgatcatttcatcaccatgaattccttctcttttactcgtttagcaaccggctaaacatccccaccgcccggccaaaagaaaaataggtccatttttatcgctaaaagataaatccacacagtttgtattgttttgtgcaaaagtttcactacgctttattaacaatactttctggcgacgtgcgccagtgcagaaggatgagctttcgttttcagcatctcacgtgaagcgatggtttgccttgctacagggacgtcgcttgccgaccataagcgcccggtgtcctgccggtgtcgcaaggaggagagacgtgcgatatgaataacgaggaaacattttaccaggccatgcggcgtcagggcgttacccggcgcagctttctcaaatattgtagtctggctgccacgagcctgggattaggcgcgggaatggcaccaaagattgcctgggcgctggagaacaaaccgcgcattccggtggtatggatccacggtctggaatgcacctgctgtaccgaatcttttatccgctccgctcacccactggcgaaggacgtcatcctttccctgatttccctcgattacgacgatactttgatggctgccgccggaacccaggcggaagaagtctttgaagacatcatcacgcaatacaatggcaaatatatcctcgcagtagaaggtaatccgccgctgggcgagcaggggatgttctgtatcagcagcggtcgaccgtttattgagaaactcaaacgtgccgctgccggagccagcgcgattatcgcctggggaacctgcgcgtcctggggctgcgtgcaggccgcgcgacccaatccgacgcaggcaacgcctatcgacaaagtcatcaccgacaaacccattatcaaagtacctggctgcccgccgatcccggatgtgatgagcgccatcattacttacatggtgacctttgatcgcttgccagatgtcgacagaatgggccgtccgctgatgttctatggtcagcgaatccacgataaatgctatcgccgcgcccacttcgacgccggagagttcgtccagagttgggatgatgacgctgcccgcaaaggttactgcctgtacaaaatgggctgcaaagggcctaccacctataacgcctgttcctccacacgctggaatgatggcgtttctttcccaatccagtctggtcacggctgcctgggctgtgcggaaaatggtttctgggatcgcggtagcttctacagccgcgtggtcgatattccgcaaatgggtactcattccaccgccgataccgtcggtttaaccgcgcttggcgtggtggcagcggctgttggtgtgcacgcagtcgccagcgccgttgaccagcgcagacgtcataaccagcaacctacagaaaccgaacatcagccaggcaatgaggataaacaggcatgagcactcagtacgaaactcagggatacaccatcaataatgccggacgccgcctggtggtcgacccgattacgcgcatcgaaggccacatgcgctgcgaagtgaatattaacgatcagaatgtgatcaccaatgccgtctcctgcggcaccatgtttcgcgggctggagatcatcctacaagggcgcgacccgcgcgatgcgtgggcgttcgttgaacgtatctgcggcgtctgtactggcgtacacgccctggctagcgtttacgccatcgaagatgctatcggtattaaagtgccggacaacgccaatatcatccgcaacattatgctggcaacgctctggtgccacgatcatctggtgcacttctatcagcttgccgggatggactggatcgatgtgttagatgcgctgaaagccgacccgcggaaaacctccgaactggcgcaaagtctctcctcttggccgaaaagttcccctggctatttcttcgacgtacaaaaccgcctgaaaaaatttgttgaaggcgggcagttggggatcttccgcaatggctactgggggcacccgcagtacaaactgccgccagaagctaacctgatgggctttgcccactatctcgaagctctcgatttccagcgtgaaattgtcaaaatccacgcggtctttggcggtaaaaacccgcatccaaactggattgtcggcgggatgccttgcgccatcaacattgacgaaagcggcgcggtcggggcagtcaatatggaacgcctgaacctggtgcagagtattatcacccgcacggcggacttcattaacaacgtgatgatccccgacgccttagccatcggtcagttcaacaaaccgtggagcgaaatcggcactggtctttctgataaatgcgttctcagctacggcgcattcccggatattgccaacgactttggcgagaaaagtctgctgatgcctggcggcgcggtgattaacggcgacttcaacaatgtgctgccagtggatttggttgatccgcagcaggtgcaggagtttgtcgaccacgcctggtatcgatatcccaacgatcaggtcgggcgtcatccgttcgatggcatcaccgacccgtggtacaaccccggcgatgtcaaaggcagcgataccaacattcagcagctgaatgaacaggaacgctacagctggatcaaagcgccacgctggcgcggtaacgcgatggaagtggggccgctggcgcgcacgttaatcgcttatcacaaaggcgatgctgcgaccgttgagagcgtcgatcgcatgatgagcgcgttgaacctgccgctttccggtatccagagtacgttaggccgcattttgtgccgcgcgcacgaagcgcagtgggccgcaggtaagttgcagtatttcttcgacaagctgatgaccaacctgaaaaacggcaatctcgccactgcttccacggaaaaatgggaacctgcaacctggccgacagagtgccgtggtgtcggttttaccgaagcgccgcgcggggcgttaggccactgggccgccattcgcgatggcaagattgatctctaccagtgcgtggtgccgaccacctggaacgccagcccgcgcgatcccaaagggcagattggcgcttatgaagcggcgctgatgaacaccaaaatggcgatccccgagcaaccgctggagatcctgcgtactctgcacagctttgacccgtgcctcgcctgtagtacacacgtgctgggcgacgacggtagcgagctgatctccgtgcaggtgcgttaacagcgaaggagaatcatcatgcaacagaaaagcgacaacgttgtcagccactatgtctttgaagcgccagtgcgcatctggcactggttgacggtgttatgcatggcggtgttgatggtcaccggatactttatcggcaagccgctaccttccgtcagcggcgaggcgacgtatctgttctatatgggctacatcaggttaattcacttcagcgccgggatggtttttaccgtggttttgctgatgcggatctactgggcttttgttggcaatcgatactcccgcgagctgtttatcgtgccggtatggcgtaaaagctggtggcagggcgtgtggtatgaaatccgctggtatctgtttctggcaaaacgtccgagtgccgatataggccataatcccatcgcccaggcggcgatgttcggctatttcctgatgagcgtctttatgatcatcactggttttgcgctgtacagcgaacacagccagtacgctatttttgcgccgttccgttatgtggtggaatttttctactggacgggtggcaacagtatggacattcacagctggcatcggctggggatgtggctgattggcgcgtttgtgatcggtcatgtctacatggcgctgcgtgaagacatcatgtccgacgacacggtgatctccaccatggtcaacggctaccgtagccacaaatttggcaaaataagtaacaaggagcgtagttgagctaaataagtaacaaggagcgttcatgagcgagcaacgcgtggtggtcatggggctgggcaacctgctgtgggccgatgaaggcttcggcgtgcgggtggcggaacggctgtatgcccattaccactggcccgagtatgtggagattgtcgatggcggtactcagggactgaacttgctggggtatgtcgaaagcgccagccatctgttgattctcgatgccattgactacgggctggaacctggaacgctgcgaacctatgccggagaacgcattccggcttatctcagcgcgaagaaaatgagcctgcatcagaacagtttctccgaagtgttggcgctggcggatatccgcggacatctgccagcacatattgccctcgtcggtctgcaacccgcaatgctcgacgactacggcggtagcctgagcgaactggcacgggagcaactgcccgctgcggaacaggcggcgctggcgcagcttgctgcgtggggaattgtgccgcaaccggctaatgaaagccgctgtctcaattatgactgtctgagcatggaaaattacgaaggcgttcgcttgcgccagtaccggatgacacaggaggagcagggatgagcaacgacacgccatttgatgcgttgtggcaacgaatgctggcgcgcggctggacgccagtcagtgaatcccgtcttgacgactggcttacgcaagcgccagacggcgtggtgttattaagcagtgacccgaaacgcacgccagaggtcagcgataatccggtaatgattggcgaattactgcgcgagtttcccgactatacatggcaggtggcgattgctgaccttgagcagagcgaagccatcggcgatcgctttggcgtctttcgctttcctgccactttagtgtttaccggcggaaactatcgcggcgtgctgaatggtattcacccgtgggcggaactgataaacctgatgcgcgggcttgtcgaaccgcagcaggagcgtgccagttgatctaaccgcagcaggagcgtgcctcatgagcgaaacttttttccatctgctggggccaggaacgcaaccgaacgatgacagtttcagcatgaatccactgccgatcacctgtcaggtgaatgatgaaccgagtatggcggccctggagcaatgtgctcacagcccgcaggtgattgcgctgttaaacgagttacaacatcaactaagcgaacgccaaccgccgttgggcgaggtgctggcagtcgatctgttaaatctcaacgccgacgatcgtcactttatcaatacgcttctcggggaaggggaagtgagtgtgcgcattcagcaggctgacgacagtgaaagtgaaatacaggaggcgatcttctgcggattatggcgggtgcgcagacgtcgcggcgaaaagttgctggaggacaaactggaggctggctgcgcgccgctggcgttgtggcaggcggcaacgcaaaatctcttgccgacagatagcctgttaccgccgcccattgatggcctgatgaatggcctaccgttggcgcatgagttactggcacatgtacgtaaccccgacgcgcagccgcacagcattaatctgacgcaattacccatcagcgaggctgatcggctttttctcagtcgtctctgtgggccgggaaatattcagattcgtaccattggctatggcgagagctatatcaacgccacggggttacgccatgtctggcatttacgctgtacggacaccttaaaaggcccgttactggaaagttatgaaatctgcccaataccggaagtggtgctggcagcgccagaagatttggtcgactctgcgcagcggcttagcgaggtatgtcagtggctggcggaagctgcaccgacgtaaaaagacggtaagtatcgctttcagtcttatgaatatcgcaatcggcgaatacctctggtcgtagagtttcaggataaagagggagatctaccattatcgggttatttttctctcttcgcctacaggagtgcgcatgtgggatgtcattgatttaagccgctggcagtttgctctgaccgcgctgtatcactttttatttgtaccccttaccctggggctgatttttttgctggctattatggaaaccatttacgtggtcaccggcaaaacaatctaccgcgatatgacgcgcttctggggtaagctcttcggtatcaattttgctcttggcgtggctaccggcctgaccatggagtttcagtttggtactaactggagtttctattccaactatgtgggcgatatttttggcgcaccgctggcgatggaagcattaatggccttcttcctcgaatccacctttgtcgggctgttcttcttcggctggcaacggctgaataaataccagcacctgctggtgacgtggctggtggcgttcggtagtaatctctctgcgttgtggatattgaatgccaacggttggatgcaatacccgaccggtgcgcattttgatatcgacaccctgcgtatggagatgaccagcttcagcgagctggtctttaatccggtcagccaggtgaaatttgtgcacaccgtaatggcgggctacgtgaccggggccatgtttattatggcgatcagcgcctggtatttactgcgcggacgggagcgcaatgtcgcattacgcagctttgccatcggttccgtcttcggtactctggcgattatcggtaccctgcaactcggagacagttctgcgtatgaagtcgcgcaagtacaaccggtaaaactggcggcgatggaaggggagtggcaaacggaacctgcacctgcaccgttccatgtggttgcctggccggaacaggatcaagagcgtaacgcctttgccctcaaaattcccgcgctgctagggatcctcgccactcacagtttagataaacccgtgccgggtctgaagaatttgatggctgaaacctacccacgcttgcaacgcggacgtatggcctggctgttaatgcaggaaataagccaaggcaatcgtgagccgcatgtgttgcaggcattccggggactggaaggtgacctgggctacggcatgttgctctcccgctatgcgccggatatgaatcatgtcacagccgcacagtaccaggcggcgatgcgtggcgcgatacctcaggttgcgccggtattctggagtttccgcatcatggtgggctgtggttccctgctgctactggtgatgctgattgcgcttgtccagacgctgcgtggcaaaatcgaccagcatcgctgggtgctgaaaatggcgctctggagtttgccgttgccgtggattgcgattgaagccgggtggtttatgaccgagtttggtcgtcagccgtgggcgatacaggacatcttaccgacatactccgcgcactccgctttaaccacaggacaactggctttcagtctgatcatgatcgtagggctttacaccctgttcttaatcgccgaagtctacctgatgcagaaatatgcccgtctggggccgagcgcgatgcagagtgaacaaccgacgcagcaacaggggtaaaggagaaaatcatgtttgattatgaaacattgcgcttcatctggtggctgctgattggcgtgatcctggtggtctttatgatctccgacggatttgacatggggatcggctgtctgctgccgctggtggcgcgtaatgatgatgaacgccggatagtgataaacagcgttggtgcacactgggaaggcaaccaggtctggttgatcctcgctggtggggcattatttgccgcctggcccagagtgtatgcagcggcgttttccggcttttatgtggcgatgatcctggtgctgtgcagtctgttcttccgcccgctggcctttgattatcgcggaaaaatcgccgatgcacgctggcgtaaaatgtgggacgccggtctggtcatcggcagtctggtgccgccggtagtcttcggtatcgccttcggcaacttgttgctcggcgtgccgtttgccttcacaccgcaattacgcgtggagtatctcggcagcttctggcaactgctgacgccattccctttattgtgcggattgctcagccttgggatggtgattttgcaaggtggcgtctggttacaactgaaaactgttggtgtgattcatctgcgtagtcagctggcgaccaaacgcgctgcactgttggtgatgctgtgctttttgctggcgggttactggctgtgggtcggtattgatggctttgtactgctcgcccaggatgctaacggtccttccaatccgttaatgaaactggtggcagtgctacctggtgcctggatgaataattttgtcgagagccccgttttgtggatcttcccgctgctgggattcttctgcccattgctgacggtgatggcgatttatcgtggtcgcccgggttggggatttttgatggcaagtttgatgcaatttggcgtgattttcacggcaggcatcacgctgttcccctttgtcatgccgagtagcgtgagtccgatctccagcctgacgttgtgggacagtacttccagtcagctgacgctgagcattatgttggtaatcgtgctgatatttttgcccattgtgttgctctacactctctggagctactacaaaatgtgggggcgcatgacaacagaaactctccgccgtaacgaaaacgagttgtactaaggagcagaaacaatgtggtatttactttggttcgtcggcattttgttgatgtgttcgctctccacccttgtgttggtatggctggacccgcgtctgaaaagttaacgaacgtaggcctgatgcggcgcattagcatcgcatcaggcaatcaataatgtcagatatgaaaagcggaaacatatcgatgaaagcgatcttaatcccatttttatctcttctgattccgttaaccccgcaatctgcattcgctcagagtgagccggagctgaagctggaaagtgtggtgattgtcagtcgtcatggtgtgcgtgctccaaccaaggccacgcaactgatgcaggatgtcaccccagacgcatggccaacctggccggtaaaactgggttggctgacaccgcgcggtggtgagctaatcgcctatctcggacattaccaacgccagcgtctggtagccgacggattgctggcgaaaaagggctgcccgcagtctggtcaggtcgcgattattgctgatgtcgacgagcgtacccgtaaaacaggcgaagccttcgccgccgggctggcacctgactgtgcaataaccgtacatacccaggcagatacgtccagtcccgatccgttatttaatcctctaaaaactggcgtttgccaactggataacgcgaacgtgactgacgcgatcctcagcagggcaggagggagtattgctgactttaccgggcatcggcaaacggcgtttcgcgaactggaacgggtgcttaattttccgcaaagtaacttgtgccttaaacgtgagaaacaggacgaaagctgtagtttaacgcaggcattaccaagcgaactcaaggtgagcgccgacaatgtcagtttaaccggtgcggtaagcctcgcaagtatgctgacggagatatttctcctgcaacaagcacagggaatgccggagccggggtggggaaggatcaccgatagtcaccagtggaacaccttgctaagtttgcataacgcgcaattttatttgctacaacgcacgccagaggttgcccgcagccgcgccaccccgttattagatttgatcaagacagcgttgacgccccatccaccgcaaaaacaggcgtatggtgtgacattacccactagtgtgctgtttatcgccggacacgatactaatctggcaaatctcggcggcgcactggagctcaactggacgcttcccggtcagccggataacacgccgccaggtggtgaactggtgtttgaacgctggcgtcggctaagcgataacagccagtggattcaggttagcctggtcttccagactttacagcagatgcgtgataaaacgccgctgagtttaaatacgccgcccggagaggtgaaactgaccctggcaggatgtgaagagcgaaatgcgcagggcatgtgtagcttggcaggttttacgcaaatcgtgaatgaagcacgcataccggcgtgcagtttgtaatgcataaaaaagagcattcagttacctgaatgctctgaggctgatgacaaacgaagaactgtctaatgcgtagaccggaaaaggcgttcacgccgcatccggccactttcagtttgcaatacgtacgcttgagatcaggattgtctactttgagtataacatccttgtgaaatctccctttcctcataccgcttgcactatatactgcgggtaggaaaggcgcgcagagggaaatataagattgttaactatccccctctggaaatacgacttgtgagcataagataaatcttagcaaaatacaaattaaagataaggaaattgttacgaaagctattaattattgttggtaatatagtttcaagtggtactataactggctgttaaatggcatttataactattaggtgcagagatattcgcttaaatggattagtttctttgtggaaaagtaactgatgttataatgtatgatgttgactatttcactattccaataaaaccagtcagctttaaacaagcagcgtcatattaagagagataaacatttgccgctgttggtcctcgcaggccatttacgcggcaaaattccacacgtaatcctggtataagcacttctgcgtcgcggggagtgaatgcggaaatatggacctgaacttctttacgaccgtcggaggggataatgaatcctttgccgcttttgcgatcaaaggttttgacaattcctgtcattttacgggacaaacaaattccttactgaaaatactgcgctgcactatacggggttaataaaataaagccagcgatatttaagaccgccggacggctaaaataaaatttgcttaatctcaattatcatgcgttaatagctgcgtcggtttgaaagacagacagcatacaaagtagtttactaaagcagttctcattatcaggcattatccccttcttttgagtctctctcctgaacactaagtagtttctgtattaaagccctgtttgccgaaaggcccaaaatgaaggaagtaaaatatgtctaataaaatgactggtttagtaaaatggtttaacgcagataaaggttttggctttatcactcctgatgatggcagcaaagacgttttcgtccatttcaccgccatccagagcaatgaattccgcacgctgaacgaaaatcagaaagttgaattttctattgagcaggggcaacgtggccccgcggcagcgaacgttgttacgctctaaggttgccattattactcaacatctccatttccgctgtccatgttgtcatggttcacagtaccgcacatcggcattcgatgtgacggagcgaaaccctttgggcgctaagtgtattttttgtaaatcgacgatgatcacctttgataacgtcgcgctgcaaatacgcactgaccatgcgccgctggattagtcaaaataatatcaggctccctcgtggagccttttttatatctgccttatttttcttcaacgctgtatgtatagtaagcgataacctgttgattattgaatctttcggggagatggcttataacatttcttacctgaccagggtaccgggaaccaacaccttactggcgtgttgctgtcttttaagaccagaagaggttaacagtgaatattgaagagttaaaaaaacaagccgaaacggaaatcgccgactttatcgcgcaaaaaatcgccgagctgaacaagaatacagggaaagaagtctctgaaattcgcttcaccgcacgagaaaaaatgaccgggcttgaaagttatgatgtcaaaatcaaaataatgtgattttgtgaacatcaccccgtgcgaggtgatgttccgcttgttgctaatttagtgaccaatcattggcgcttgtggaattaagcgtcggtacaattcctccggcaccgggctttgccatactcccgcatacattgcgtaaccaatcaccgcaaacataatccccagaaccagtagcgtcattaaccagccagacaacgcaaaggcttttttatttgccgcaggtttttgcagactaaaggtcaatgtactggctaccggacaactctctacgcaagtcatacagccggtacattccactgttcgtacctgaattaatttatcgaccgggatccgacttgggcaattttttgcgcatttgccacagtcgatacaactttcggcattgcgacgaatcttaaacgggctcaataggctaaccacgcccatcagcgcgccatatgggcaaagataacgacaccaggcatggcgaataaacaggctggcaatcagcaaaacggtcacgctgattaatgtcgcggtccccatatgacgaaagaaatcgagcattttaacgtccatcaccacgctgtaggggctcaacataaaatagtgaatcgcctgagcgggcatcaataacgcgatatagataaaaaaactcaacagcaaatacttcacgccgcgcagaggaatatccagccagcggggaaggacacattgccgaccaaacagtttgttaccgagatcgccgattaattcagaaagcgtaccaaccgggcataaccaactgcaaaaggcctttttgagtaatagactgatgacgataaaagcgaccaataacagcatcgcggcggcgtggacggacggtaactgacctgttacaaggctatatttcagattcatcagcccggcaatcggtagccagccttcgatacctcccggtctggcgacaaatgtcgtgctacttgccgtttcgtaatagcgcacccaataccagaacgtgatggcaatataaatattcattgccaacagtaataattgcgtcgctttacgccaggtcgtggcattacgccagtcattccacggtaatttgccgcccgtcgtgcctggccgccgctgccagcgggttcttttattctctgccatgattttgccagtccgttaagttgtataccaaatgccactattctagttgttcttaactggctgatattgattcaaatcgcgttcaggtctttcttatgcaaccatgcttccagagcggcaacactgcgtgtaatttcttcgtgtggaaggggggcagataatggctgctgctccagttgtgcgcatagctggctggcgatatgcattcccagactgctgcaactgctttttagctgatgcgcggcacgctttattttctcgctatcctgactggcgcgggcaatgtcgatttcatcgagaagcggcagggcatgttgtgtaaataataccagccattcgtggatcttctccgtccccattaactgagcatcttcattgagttggcttacatccaggctttgatcattattgacttgcagttggagatagtgcgccagtaactgaccgagcacttcacgcggcaccggtttagggataatcccgcggaataaactactggtacgctggcgcagcgtttcgtcaatgacatgggcgctaaagccaatcaaaaccaggctcggatattgctgtgccagttgtcgggcaagcgtaatgccgtcgatatccggcagatcaaaatccaccagtgcggcagcaaacggttcgctattttgcagtgtctctaaagcctgcgcggcattgccaacagcaacaatctgcgcaccactggttttcagcatctcaatggtaattcgctgggttagcgggttatcttcaattaacagcaaacgtaaaccgtcaagacgcaccgcctgattgactgtttttggcacgggtgccgtggcaacacgtaacggcaagcgtaaacaaaaacagcttccaacctccggcgtgctggtggcgctcagttcgccgcccatcgcctgggccagacggctactgatagtcagtcccagcccggtgccgccgcgtttgccgcttacctgcacaaatggctggaagatttctgccagtttcgcgggatcaataccgcagccgctgtcttccacttcgaccagccattgctcgccatcagtgcgactacgcaggataatgtacccttcgtcagtaaaacgcagggcgttgctcaacaggttggttataacctgacgaatacgtcgtggatcgcccattaacgcgcacggcatatcatcggcaattgccgttgccaggcgaatcgggcgacctttcacccgtccgctcattaattgcagggtactttccagcagcgggcgcggttcaaagggctcatcgctgacgctaacattcttgccacctgcttcgatagcggaataatcgagaatatcgttgaggatggtcagcaagctttcaccagagtcagtaattgcccgcaaatcatcacgctgggcgttaagtgcggggttatctgccagcagttgagcagtgccgagaataccgtacagcggtgtgcggatctcatggctcatcgccgccagaaacgcgctttttgcctggctggctttttctgcttccgcccgtgcctgtcggtgttctatcaccagttcctgcaattcagctgtacgcgctttgacctgcgccgccagctgttcgcggtggcgattcagtgcatgaacattgctgcgaaacgcatccatcagccgcccgatggtatccagctcccgtacgccagcggtttccgggaaaggggagtcaatatcaccgtccagcagccgttgcagcgcctgcgtttgttcggcaagtggacgcgtgacactgcgataaaccacgcgccagaggatcagaatcagtgcgcaaagactaaccatccccagcaataacaggctgtattgcccgcgtgcactcgctttttccagatgcgccagtccgtgctgattacgcagctcaatggtgtcgaccagctgactgacttcgctactaaactgcgcgaactgggcgatgttattttgtgcgagagtttgtaggtgattgctgatttcactgtcctgctgatacagcgccagcaaatcgctatattggctaacggtagttaacgttgttgcgacctgcgcacgaacacccggatcttcaatgcgtatttgccgacgttgcagaattttcaccgcattattgagctgcttttccagcgttggtgcatttttctggatctgctccagccccagattcatcaccatttgctgcacccgcagagcgctaaggcgcagttcattcatctggttaacatactcaagatcgatatcaatcagccgatcgagtgcactttcagcagcctgacgctgatcttgttcgatcaaatcgtaaatcccggcctgggtcgctccagcggaagttgtcgcattattcgcctgaccttgcgccaggcgtgcgatctcatcggcggcagcgactatctgctgactgagttgctgttgttgctggcgcagttgcaaacgctgccccaccagttccccttgctgacgtaagctacgggagatctcctgctcctgttgttcaatagcggtggtatcaaaaccttgttcccgtaacgcttgcagcaacgcattaatcttcaggctttgtgcggtgagcattcgcccctgcgcctgccacatcttttcgttatcggcactggtcaggttctgcgcggcgaaaagttcccaggcgctggcttcgctcaactggcgcgccatattcatggtaggaatcaatgcctgagtgttgtctttttccacctggctgataaagcgcaggttgtaccatcccaccagggtactggtcagggttaacagcgccatcagggcaaagcccatccagagtcttcgggtcagggttaaattcacggtcggtgcactttaggtgaaaaaggttgagtcgcaaagcggaatgcatctagcataaagccttattattgatgaggctatcatgcgcgtactgctatttttacttctttcccttttcatgttgccggcatttagcgctgataacctgttgcgctggcatgatgcgcagcatttcacggtgcaagcctctacgccgcttaaagccaaacgcgcatggaaactgtgcgcgctttatcccagcctgaaagatagttattggttaagcttgaactatggtatgcaggaggctgctcgccgctacggtgtggatttaaaagtgctggaggcaggcggctacagccagttggctacccagcaagcacaaatcgaccagtgtaaacagtggggcgcagaggccattttgctcggtagtagcacgaccagttttcccgacctgcaaaagcaggtagcaagtctgccggtgatcgaactggtaaatgctattgatgctccccaggtgaaaagccgcgttggtgtgccctggtttcagatgggctatcaaccggggcgatatctggtgcaatgggcgcacggtaaaccactgaatgtgctgttgatgcccggacccgataacgccgggggcagtaaggagatggtcgagggttttcgcgcagccattgccggaagcccggtgcgtattgttgatattgcgcttggtgataacgatattgaaatccagcgtaacctgttgcaggagatgctggaacgccatccagaaatcgacgtcgttgccggaacggccattgcggcagaggcggcaatgggggaagggcgtaacctgaaaacgccgcttaccgtggtgagcttttatcttagtcatcaggtgtatcgcgggctgaagcggggaagagtgattatggctgccagcgatcaaatggtctggcagggggaactggcggttgagcaggccatcaggcaattacaggggcaaagcgtttctgataatgtcagcccaccgattttagttctgacgccgaaaaatgccgaccgtgaacatattcgccgcagcctgagtccagggggatttcgtccggtctatttttatcagcacacaagtgcggctaagaaataatcagcacacatcagcggctaagaaataaccttcaccatgttgcgtcaccagtaaatccgcgctgagtttatgacgtaaacgacgaattaacacatcgacggtgcgcaggtcagggttttccacccgacgcgcagaaagcatacgtagcagacgttcacggctgagaatttcgcccggattcgtcacaaatgccaccaacatttcatactctgcgcgggtcagtttaatcggctcgccatcccgctccagcgtatggcggctcacattcaggcaataaccggcaaagcgatagcagttgtcctgagtgtgcggttgagcttgtcgcgcgaggtcgattcgccagagcagatttttcacccgtactaccagttcgcgcagttccagcggtttggtgacgtaatcgtctgcgcccatttccagcccaacaatacggtcaatccgatcgctgcgtccggtaaccagaataatccccaccgtactgcgttctcgcagggcgcgggttaacatcaggccattttcatcgggtaagttgatatccagcagaattaaatctacgctctgattctgcataatttcccgtagcccagcaccgctcgccgtaacggaaacggtatacccctcctgagtgaagtaggattgtaatcgcgcctgggtaaccggctcatcttcaacaataacaatgtgatgtggcatcagagggttttactcattctgttcatatctgttcatattctgccgtaagccgttcatcctgaccagtgccgctgttcatatttgctcattaagatcgcttcactaaaccataattctacaggggttattatgcggaaactctggaacgcgctacgccgacccagtgctcgttggagcgtactggcgctggtcgcaattgggattgtgattggcattgcgctgattgtattgccacacgttgggatcaaagtcaccagcacaaccgaattttgtgtcagttgccacagtatgcaaccggtgtatgaagaatataaacagagcgtgcatttccagaacgcctccggcgtgcgagctgaatgccatgactgtcatatcccgccggatattccaggcatggtgaagcgcaaactggaagcgagcaatgatatctaccagacctttattgctcactccattgatacacctgaaaaattcgaagccaaacgcgcggaacttgccgagcgtgaatgggcgcgaatgaaagaaaacaacagcgcaacctgccgctcctgccataactacgatgcgatggatcatgcgaagcagcatcctgaagcagcacgtcagatgaaggtggcagcgaaagataatcaatcctgcatcgactgtcataaaggtattgcccaccagttaccggatatgagtagcggcttccgtaagcagttcgatgagctgcgcgccagtgctaatgacagtggtgacacgctgtactctattgatattaagccaatttatgcggcgaaaggcgataaagaagcctctggttctctgctgcctgctagcgaagtgaaagtccttaaacgtgacggcgactggctgcaaattgaaattaccggctggacggaaagcgccggacgtcagcgtgtactcacccaattcccaggtaaacgcatctttgttgccagcattcgtggtgatgtgcagcagcaggtaaaaacgctggagaaaaccaccgttgccgacaccaataccgagtggagcaagttgcaggccactgcgtggatgaagaaaggcgacatggtgaacgatatcaaaccgatctgggcttatgcggatagcttgtacaacggcacctgtaaccagtgccacggcgcaccggaaatcgcccactttgacgctaacggttggatcggcacgctcaacggcatgattggctttaccagtctcgataaacgtgaagaacgcaccttgttgaaatatctgcaaatgaatgcgtctgacaccgcaggtaaggctcacggcgataagaaggaagaaaaataatgaacaataacgatctctttcaggcaagtcgtcggcgttttctggcacaactcggcggcttaaccgtcgccgggatgctggggccgagtttgttaacgccgcgacgtgcgactgcggcgcaagcggcgactgacgctgtcatcagcaaagagggcattcttaccgggagccactggggggctatccgcgcgacggtgaaggatggtcgctttgtggcggcaaaaccgttcgaactggataaatatccgagcaaaatgattgccggattgccggatcacgtacacaacgcggcgcgtattcgttatccgatggtacgcgtggactggctgcgtaagcgccatctcagcgatacctcccagcgcggtgataaccgttttgtgcgcgtgagctgggatgaagccctcgacatgttctatgaagaactggaacgcgtgcagaaaactcacgggccgagtgccttgctgaccgccagtggttggcaaagcacggggatgttccataacgctagcgggatgctggcgaaagctattgccttgcatggtaatagcgttggtacgggcggagattactctaccggtgctgcgcaggtgatcctgccgcgcgtagtcggtagcatggaagtgtatgaacagcaaacctcctggccgctggtattgcagaacagcaaaaccattgtgctgtggggctccgatttgctgaaaaaccagcaagcgaactggtggtgcccggatcacgatgtttatgaatattacgcgcagctaaaagcgaaagtcgccgccggtgaaattgaggtcatcagcatcgatccggttgtcacatccacccatgagtatctggggcgcgagcatgtgaagcacattgcggttaacccgcaaactgacgtgccgctgcaactggcgctggcacatacgctgtacagtgaaaacctgtacgacaaaaacttccttgctaactactgtgtgggttttgagcagttcctgccgtatctgctgggtgagaaagacggtcagccgaaagatgccgcatgggctgaaaaactgaccggcattgatgccgaaaccattcgtgggctggcgcggcagatggcggcgaacagaacgcaaattattgctggctggtgcgtgcagcgtatgcagcacggtgaacagtgggcgtggatgattgtggttctggcggcgatgctggggcaaattggcctgccaggtggtggttttggttttggctggcactacaacggcgcaggcacgccggggcgtaaaggcgttattctgagtggtttctccggctctacgagcattccgcctgttcacgacaacagtgactacaaaggctacagcagcactattccgattgcccgttttatcgatgcgatcctcgaaccggggaaagtgatcaactggaacggtaaaagcgtaaaactgccgccgctgaaaatgtgtatttttgccggaactaacccattccatcgccatcagcagatcaaccgcattattgaaggcttgcgcaagctggaaacggttatcgccatagataaccagtggaccagtacctgccgctttgccgatatcgtactgcctgcgaccacgcagtttgagcgtaacgatctcgaccagtacggcaatcactccaaccgtggcattatcgccatgaaacaggtggtgccgccgcagttcgaggcgcgcaacgacttcgatattttccgcgagctgtgccgtcgctttaatcgcgaagaagcctttaccgaagggctggacgaaatgggctggctgaaacgcatctggcaggaaggtgtacagcaaggcaaaggacgcggcgttcatctgccagcgtttgatgacttctggaataacaaagagtacgtcgagtttgaccatccgcagatgtttgttcgccaccaggcattccgcgaagatccggatctcgaaccgctgggcacgccgagtggcctgattgagatctacagcaaaactatcgccgatatgaactacgacgattgtcaggggcatccgatgtggtttgagaaaatcgaacgctcccacggtgggcctggcagccaaaagtatccgttgcatctgcaatctgtgcatccggatttccgacttcacagccagttatgtgagagcgaaacgctgcgtcagcaatatacggtagcgggtaaagagccagtattcattaacccgcaggatgccagcgcgcgcggtattcgtaacggtgatgtggtacgcgtctttaacgctcgcggtcaggtgttggcaggggcagtggtttctgaccgctatgcacccggcgtggcacgaattcacgaaggggcatggtacgatccagataaaggcggcgagcctggtgcgctgtgcaaatacggtaaccccaacgtgttgaccatcgacatcggtacaagccagctggcgcaggcgaccagtgcgcacactacgctggtggaaattgagaagtacaacggaacagtggagcaggtgacggcgtttaacggccccgtggagatggtggcgcagtgcgaatatgttcccgcgagccaggtgaaaagttgaattaacccgcgtcgcaggtgaaatcatgaccacgctgacagcacaacagattgcctgtgtttacgcctggctagcgcagttgttctcccgtgagctggacgatgaacaactgacgcaaatcgccagtgcgcagatggctgaatggtttagcttgctgaaaagcgaaccgccgctcactgcggcggtgaacgagctggaaaaccgtattgccacgctgacagtacgtgacgatgcccgtctggaactggccgcggacttttgcggcctgtttctgatgaccgacaaacaagcggcgctgccgtatgcaagcgcctacaaacaggacgagcaagagattaaacgcttgttagttgaggcagggatggaaaccagcggcaatttcaacgaaccggcagatcatctggcgatctatctcgaattgctcagccatctgcattttagcctgggagaggggaccgttcctgcgcgaagaatcgacagtttgcggcaaaaaacactgacggcgctgtggcaatggttaccagagtttgttgcgcgttgtcgtcagtatgacagctttggtttttacgcggcactaagccagttattgctggtgttagtggagtgcgaccaccaaaacagataacgtcgtttgtgcgcctgaaaagacgcgtttagcgtcgcatcaggcattatggcgcagttgccggatgcggcgtgaacgtcttatccggcccacaggaactgtaatctttgtagaccggttaagatgcgtcatcgcatccggcaaacacacatcacggatgagctacaaaccgggaaagccgctggcgcagcaggcggttttcctgcttcaggtgcgcaatatcatccattaacgtcagcgccaccgcgatccccggccagtccagagccagttcatgacgcaggcgtaccgcgcgttgcaccacaatggcggcatggtcgtcaaatacccaggttgtttcctggatctcacgcggttcaaccacccccaaaccgacaatttcattcaactcctcttcagagatgccggtatgcaggcaaaattcggtaatagtaaaagtcaccgtaacattagccattatgctttcccccaatctttacgtggatcaaaagagctctgggcgtctgccagttgctgccacagcgcggcagtgttttcatccggtttcggcggcatcacgattttcagtaccgcatacagatcgccggtctgttttttgctcaccagacctttgcctttaacgcgcaatcgttgcccggcctggctgcctggcgggatagtcagcaaaatgctttctttcagtgttggaacggtgactttagcacccagcgccgcttcccacgggctaaccggcaccacaatttccagatcctggccgacaatatcaaacagcggatgtggcgcaatatgaatcaccagccacaaatcgccatttggaccgccgttttcgcccggcgtcccctggcctttcagacggatgcgttgaccattgccgacgcccgccgggatcttcacattcagcgttttcggaatttcctgttcgatcatgccaaaggcgttataaaccggcaggttatagctgatggtacgcttatgctcagtaagcgtttcttcgaggaataccgccacttcgatttcaatatcgtggccgcgtgtggcggggcgttgacggctctggcgggcatgctgaccgaaaatactgctgaagatatcgtcaaaatcttcggcgttaaaactctgaccgtcgccatggtggaactgacggttaaattgcggatcgttgcgatgttgccacatctgatcatactcagcgcgacgttgttcatcacttaacacttcccaggcttcagcgacctctttgaagcgggcttcggcatccggttctttgctgacatcaggatggtatttgcgggcaagtcgacgataggcggtcttgattgtcttgagatcgtccgtcggtttcacgcccatgatggcgtaataatcctttaattccatagcgttatctcgcgtaaatcaacacaaattgaaggaacccctgtaaggtaactcctataagtgtagggtaatcctcaaaatttcatatgccaacacagaatatgttattgaaatcatcgcggagaggaggtcgccatcaagatgggttgctgaacatattttaaacaggtgaaaaagggtgagcgatttttgatagttgaaccaggcactttaagtttaactagggcgtcattatttattaaattttatagacgctatatatgggtagtaatatacatggaattagttgcactgcaaataattatttgaaacaggcctggaacgatataaaaaatgagtacgaaaaaaatcaaacatatagtatcacgctttttgaaaacacactggtgtgttttatgcggttatacaatgaactcagacgtaaagtaaatgaagaggatactccatgtctggaatgtgaaagtctagaaaaagaatttgaggaaatgcagaatgataatgatctaagtttatttatgagaatattgcgtactaatgatacacaaatttatagtggggttagtggaggtattacatatactatacaatatgttcgagatattgatattgttagagtgtccttgccgggcagagctagtgagtctatcacagattttaaaggttattattggtataactttatggagtatattgaaaacattaatgcgtgtgatgatgttttttctgagtattgttttgatgatgaaaatataagtgtccagccagagcggataaatacgccgggaatatctgatttggattctgacattgatttgtctggtatatcttttattcagcgtgaaactaaccaggcattaggattaaaatatgctcctgtagatggcgatggatattgtctgttaagagctatactggttttaaaacaacatgattatagttgggcgctggtcagttataagatgcaaaaggaagtttacaacgaattcattaaaatggttgataaaaaaacgatcgaggctcttgttgatacggcattctataatctcagggaagatgtaaagacgttatttggcgttgatctacaatctgacaaccaaattcaggggcagagtagtcttatgagttggagctttctgttttttaaaaaacaattcattgatagttgcttgaataacgaaaaatgtatcctgcatttacccgagtttatatttaatgataacaagaacttgcttgctttagataccgacacgagcgataggattaaagcggtgaagaattttcttgttgttcttagtgatagcatttgcagtttatttattgttaatagtaatgtggcaagtatctccttggggaatgaatcctttagtacagatgaagatcttgagtatggttatttaatgaacactggcaatcattatgacgtttacctccctcctgaactttttgctcaggcttacaagttaaacaataaggaaatgaatgcgcaactcgactatttaaatcgttatgcaatttaatggcaaaggcatatgctaaaaaccattgttattagtctcacacttttttattggtaaatattgtctctgtattggtaacgccgcagatattctgtttagccacaggtgcaattatcagcggcgtacgcgaggcaggggctaatcaggcatagtttgcgtcaaaccttgcctgtttttgaagatgtatatagaaaaacaggcgttcaacaagccattttgcgaacctgttcccggaaaaaagtcatatttctgtcacactctttagtgattgataacaaaagaggtgccaggaatgaacaaaacgctaatcgccgcagctgtggcagggatagttttactcgctagtaacgctcaggcacaaaccgtaccggaaggctatcagctacagcaagtgctcatgatgagccgccataacttacgtgcgccgctggcgaacaatggcagtgtgctggagcagagtacgccgaataaatggccagaatgggacgtccccggtgggcaactcaccaccaaaggtggcgtgctcgaagtgtatatgggccattacatgcgtgaatggctggcagagcaggggatggtgaaaagcggggaatgcccgccgccgtacaccgtttatgcctatgccaatagtctgcaacgtaccgttgcgaccgcacagttctttattaccggcgcattcccggggtgtgatattcctgtgcatcaccaggaaaaaatgggcactatggacccaacctttaacccggtgatcaccgatgattccgccgcattcagtgaacaggcggtggcggcaatggagaaagagctcagcaaactccagcttaccgacagctaccagctactggaaaaaatcgttaactataaagattcccctgcctgtaaagagaaacaacagtgtagcctggtggatggcaaaaatacctttagcgccaagtatcaacaagaaccaggtgtttccgggccgctgaaagtcggcaacagcctggtagatgcgtttactttgcaatattacgaaggttttccgatggatcaggtggcctggggagaaatcaaatctgaccagcagtggaaggtgttgagcaagcttaaaaacggctaccaggacagcctgtttaccagtccggaagtggcgcgcaatgttgcgaaaccgctggtcagttatatcgacaaagctctggtcaccgatcgcaccagcgcaccgaaaattacagtgttggttgggcacgactccaacattgcctctctgttaacggcgctggatttcaaaccgtatcagttgcatgaccagaacgaacgcacgccgattggcggcaaaatcgttttccagcgttggcatgacagcaaagccaatcgcgatttgatgaaaattgaatatgtgtatcagagtgcggaacagttacgtaatgccgatgcgttaaccctgcaggcacctgcgcagcgtgtgacgctggaattaagcggttgcccgatagacgctgatggtttctgcccgatggataagtttgatagcgtgttgaatgaagcggtgaaataacagaaaactcccccgcgagaagcgggggagtcgctggttaaacgtttttacgttcgatggtctgttcgccccaaaaaaggctatctttatcggtcttagcaaaggctttgactaacacttcatcactaccttcttcccaaatcttttccgccattttttcgtcgtacccggcgacttcgaaaatggcctcggctatttccgggctcgtattgcgcagagatgcccattcaccgacgtgatgagctttcgcttcttgagttggcatgcgtatcctcctgttgaagattagccgttaagtttaactgccagacctgcgacatattccccttgataacgagcaatagacagttcttcctggctgggctggcgactaccgtcaccgcctgcgatggtggttgcgccgtacggcgtaccgccgcgaacctgactaacgtcaaataattcctgcgctgcgtagccaatagggacaattaccatgccgtgatgcgcaagggtcgtccaggtggatgtgatggtttgttcctgaccgccgccagtaccggtggaactaaagacgctcgccagttttccgtatagtgcgccggaagcccacaggccgcccgtctggtcgaggaaggtacgcatttgaccggacatgttgccaaagcgggtaggtgtaccaaaaataatggcgtcgtaatcggccagttcttgcggggttgcaaccggtgcagtttgcgttttaccgcctgctttttcaaataattgcggcggcatggtttccggtacacgcttaacgacaacttcagcgccatccactttgcttgcaccctcagcgactgcgcgtgccatcgtttcaatatgtccgtacatggaataataaagcaccagaactttagccatttctaaccactcctcgtgttatctctattccgtagcgattcgctaccacttatttaaagataagacgtccttttcagagtgcaaatttcacaaccacttatttgatttataacaactttcacaagcacgtaattttgtcgcaaaatgacacatttttatctcatcgcgtttttttaatcataagagcggcttatggataattattggagatgatatctattctcgctaagaagctgttgcaggatattaccaaacgcgggtctgcccgcgtcagttcactaagcttagtcccacgtagcgaaaatatggcagccgccatacgccgcgttaattctatgcaatatgatgtctatacccagacggaggtcagtaatggcaaaccatcgaggcggttccggcaattttgcagaagaccgcgaaagagcaagtgaagcaggtaaaaaaggtggacagcacagcgggggtaatttcaagaatgacccgcagcgcgcatctgaagcaggtaaaaaaggtggtaagagcagtcacggcaaaagcgacaactaaccgggctaatcaatgacgaatgcatttttgtctgtagctcgtcaaaaagccatcaccgccggttacccggtggttgatactgatgacaaatgtaagcttgcctgatgcgcgatgcttatcaggcctaccagaagattgcaatatattgaatttgcactgttttgtaggccggataaggcgtttacgccgcatccggcatgaacaatgcgtacgttgtcaacaatctgcaccgccggtaaccccggcggttttctgtttatggctcctgatgaacaacttctggcggtggaacgtcaaccaactttctgcttaacaacgcattgagtaaaatcgcgccaaaggttgctgtaccaatccctcccaacgtaaaaccgcccagcgtgagagcaaaatcacccgcgcccagcactaaggttactgcgaccataatcaaattaccgttctggcttaaatcgacacggttttgtacccatatccttgcgcctgcgacggcaatcagcccgaacacaacaatacttgcaccaccaataaccgcggccggaatggtatgaatcagcgcaccaaatttcggactaaagcccaacagcatggcgatgacggcagcagcaacaaacaccagcgtgctgtagactttggtcacggccatcacaccgatattttcagcataggtggtcacgccgctaccgccgacagagccggaaagcatcgttgccagaccatcgcctacgaatgcccgccccatatacgggtccatattgcgtccggtcatcccggcgactgccttgagatgacctaagttttccgccaccagaatcaccgccacgggcgcaatcagcatcattgcctgaccattaaaagcaggagtggaaaaatgtggcagaccgaaccaggcagcatggctgacgagagtaaaatcgacggcttttcccagccctaaaacgttggtcatcacgccatacagcagacaggcgacaattaatcctacgagaatcaataaccgctggatcatgccacgggtaaacaccgccaccagcccaatacacagcaccgtcattaccgccatccagctatcaaaggcgctagcgcttacacttttcactgcgataggcgctaagttcaggccaatcgccatcaccaccgcacccgtcaccaccggcggcatcagtcgttcaatccagcgcgtaccgattttcatcaccaccaggccaatgacggtataaaccagcccacaggcgataatcccgcccagcgcaatgctgatattcgggttaatgccctgaccgttaaagcccgtcgcggcgatcaccacgccgacaaaagccgcgctggagccgagataactggggacgcgcccgccggtaataaagaaaaacagtaacgtgccgatcccgctcattaaaatggaaagattgggatccagccccatcagaatcggcattaacaccgtcgcgccaaacatcgccaccgcgtgttgaacgcccattactgccgtctgagcaaacggcaatcgttcatccggcgcgaccacgccgctctctgtagaggtgctttttaactgccagtgaggaaaaccgaacattgccatcagctgtctccttaaggaggttaacaagcagggcgcatcagcgcgtgataactgcgatcgaaccacaccagcccgtagggtgtggtgtgacgatgaatcgcttcgatggcgcaaaacagaatgtcgtgggtgccgacgctcaccacctggctgatacggcagtcaaagctaaccagagcctcttccagttgcgggcatccggtcacccccgtctgccagcgggcggcggcaaagcggtgttccatgggcgttttgccgccaaaaaggttactaagcggctcctgcccggcgctaagtgtatttacacacagcgttcgattttcattgaatgccggccagacggacgccccacgattcaggcacaccagtaatgtgggcggcgtatcggtcacactgcagacggcgctggcggtgaacccggcgcgcccggctggaccgtccgtggtgataatattgaccgccgcgcccatgcaggacatcgcatcgcgaaaagtttgttgatcgacaatgttcatagtttgctccttacaacagcccgcaggcttcttcaaaggacagacgtggcaggcgcgcataaagcttgctgctatcgccatagccgatattaatcagcagattgctcttcagcgtgctgcccgtaaaaaaggcgtcgtccacgtgttgacggtcaaagccgctcatcgggccggtatccagtcccagcgcccggcaggcgacgatcagataggccgcctgcatggaactgttgcgaaacgctgtttcttcggcaagttgtgggctggaggtaaaccaactgcgggcatcaccgtggggaaacagtagtggtaaccgttcataaaattcactgtcccaggcgacgatagcggtgacgggcgcggtcagggttttttgcagattgccgctggaaagtgccgggcgcagacgttcttttccttctgccgtgcgggtaaacacgatccgtgccggagaacagttagcacttgtcggcccccatttcatcagggcataaatctcccgtaacgtctcatcgctgacgggtgtctcccgccagccgttgtgagtgcgggcatcggtgaacagggtgctaagcgcacctgggctaacggcttcgttcatagcaattccttacagggcggcttcacggtgatgtaacaggctggcaagcccgttgagtaacagagcattaaacgtttcgggatcggtcacgttgcaggcgtgtccgccatagggcatcaccattttctggctatcgggcagggcggcatgaagttcactggaacatgctgttggcaccagcagatcatcactggcgcagatgatttgcaccgggcagcggatgcgatccgcatggtgactaaagtcagcgcgtttgagggcgttaagtcgacgcagtaaattatttttgccctgaaaatgcgccagtgccagcgcgtcttctgcctccaggcgaggtgcgcgggccgccatccagtcggcgggatagaggaacaacggctgcgcttccacccatgcctgcgcgccgccgctatacagtaatcgttcgcgaacctgaaaacagcggcgcgtatgggcgtttattcgtagccagccgttaacgctgatcagcacagttacgctcgcgggataatccagcgccagctgcattcccaccagcgcaccgagcgcatggccgaccactgcgtaatgctcaatccctgcggctaccagcgcctgatgcagttccgctgccatctgggcgatactgtaatcttctgccagcgtgtcgggattattgccggtgccgcgctggtcgtaacagactacctgatactcctgctccagcaccgccagttgcggtaaccagtaactgccgctacccccaagaccgctaatcaacaccactacgggcgcatcagcataagggggaggactgagactaagtttcatcgcggcctcacttggcgatatgcgcaattgtggcgatttccaccagcgcgtcaggttttaccagtccgcactgaatgcagaatcgcgccggtttatcacccggaaaaaactcggcgtagatttcgttaatcgcggcgtaatttttccagtcggtaataaagatgctgttgaaggtcacatccgccatcgtgccacccgccgtctcgatcaccttgcggatagtttccagaacgtggcgggtttgcgcctttgggtcatcggcaaacagcacgttattatgttgatcaaaagccagcgtaccggagacatacaccacgccatcagccagcgtgccgggaacgaagggggccagcggtgcgctgctgccagcgggaataattacggattttggcatcgttaaactccttaagcgatatgagcaaaggacgtgggagaaagcgcgtcgcagaatgtttcgacgtcgctgacccagccaaaaaaggtttcgatattgaacaacgcggctttctgcgcaaatttcggccccgcctggtgagttgcgtcttcaagcaccacgccgaaatactccagaaaaaagccgtcgcgtagcgtgctttcgacgcagacgttggtagcgatgccggtgaaaaccagatggcgtattccgcggctgcgcaaaatgctgtccagcggcgtattgaagaaaccgctgtagcgcggcttcggcagcacaatatcgccaggctgcggcaccagttcatccaccagttgataatcccaggagcctttcgccagcaatttcccctgcagctgcggctgcttacgcatggttttcagggcgttgcttttatgaaaattcggactgccgggtccgccagcctcgacatactgttcatcccagccattttgaaaccagatgatcagcatccctgccgctcgcgctgcggtcacggcggtttgaatgttggcaatgaccgggcgagtggtactgacatcaaacccggcgagatctaagtagccgcctggcgtggcataagcgttttgcatatccaccacgatcagcgcactttgctgcggatcgaaggtaatggcttccggtcgagcggttaaggtcgtcatcatgccacctcctgagtcagcgcaggtagatgggcgcggcattgcatcagtggttgaatgcgctcgccgaaggtttcgattccgctcagaaaatcgtcgaaggttaacagcacgccttcggcaccaggcacgcttgcgacttcatctaacatgcgcgcgacactggcgtaagaaccgactaacgtccccatattgatgtttaccgcgctagtgggatcggccatctgacgaacgttggtgtcagtaccggagcgggtatctttctgactttgttcggttagccagcttaacgcctcttcatccgcgcccgctttgtagtgttcccatttggcgcgagcggcatcgtcggtttcatcggcaatcaccataaacaacacataagagccaacgtcgcgtccggtttgctctgcggcctgtttcatccgcgcagcggtcggggcgaaagccgtgggtgtatttacgcctttgccgaaacagaagttgaaatcggcataccgggcggagaacgccatgccagcgtcgctttgcccggcgcagatcactttcatggggacactcggttgcggactcacgcgacaatcattcatggtgaaaaaatcgcctttaaaatcgcttttccccgtgccccacaggtcgcgcagcacctgaacatattcggtgagatagtcgtaacgacgggagaaatagtcatcgccaggccagatacccatctgctcatactcgggcttttgccagccagtcacgaggttgacgccaaaacgcccgccagagatggagtcgatggttgcggccatacgggcgacgattgccggaggtaacgttaaggtggcagcagtggcgtaaatctgaatgcggctggtcacggccgccagccccgccatcaaggtgaagctctcaaggttgtgatcccagaactcagttttgccgccaaagccacgcagtttgatcatgctcagggcgaaatcgaaatggtagtgctccgctttttgcacaatggctttattcagttcaaaggtcggcatgtactgcggcgcgtgggtgctaatgagccagccgttgttgccaataggtacgaatacgccaattttcatcatcaacctctcttcgtctcgtaaagtgaaagtcagacggggcgctgcatcctgcatatccttttcagccgcgtattggcttgtttgcaaagcggatgccagtttttaaaaagttaatgttattaatctgttaacattacgttatctaaaatatctggtaaaaagtggactaaacggtcaaaacagttgcacataaaacatgcatctgtgcgcgatgagagtgcagaaggtcgaggccgggcgggggttttgctatcctgttgccaatctacaagaggggagagcgcatgacgcaaggcgcagtgaaaacaacgggtaaacgtagccgcgcagtaagcgcgaagaaaaaagcgattcttagcgcagcactggacacttttagtcaattcggttttcacggcacaaggctggagcagatcgcagagttggcgggtgttagtaaaaccaatctgctgtattactttccgagtaaagaggcgctgtatattgccgtgctgcggcagattctcgatatctggctggcaccgttaaaagcgtttcgtgaagatttcgccccgctggcggcgatcaaagagtacatccgtctgaagctggaagtcagtcgcgattatccgcaggctagccgcctgttctgtatggagatgctggcaggcgcgccgctgttaatggatgaactgacgggcgatttgaaggcattaattgatgagaaaagcgcgctgattgccggttgggtcaaaagcggcaaactcgcgccgattgatccgcagcatttgatttttatgatttgggcttccactcaacattacgccgatttcgcccctcaggtggaggcggtgacaggcgcgacgttgcgcgatgaggtatttttcaatcaaacggttgaaaacgtgcagcggattattattgaggggattcgaccacgttaaagatgccggaggaggttgtaacatcctccggctacctgtttaacctatagtcattaagctggcgttaccgccagcggcagcggtattcacactcaggctacgctcgatatacagccgttccagaaggatattgctttcgccacgggcaaaaccctgcacgctaacaattgtgccatcccgcgcggcaactgcttcacacaatgcgcgaagctgatcgctatcaccgtggaagatcaccgcatcaaacggttgagcggttatattttccgctttcgccagttgaatacgttcgctgactgcgcttggcaatgccttcactaactgacgatgcagcgcgtcatccggccacagtacctggctgcccaccgccagcacggcggcgagctgagtcagcgcatcctgctcatcatcggcaatacacaacacgcgctcacgcggcagcagcgtccaggtgttgcgttcacccgtcggccccggcagcaatcgttgtgttcctgcctgcgccagctcgccatattgcgtacataacgcctgcaattctggacgatttgctgcccattcccgcagtgcatttagcggctgagtcaatgcggctttcaactgcgcatcgaccggatactttgcatcctgacgcgcgagcgtcactgccagcgcactttccgggcgattcgccagcagacggtagagatagagcggaccgcctgctttcggcccggtaccggacaacccttcgccgccgaacggctgcacaccaaccactgcgcccaccatattacggttaacatacaggttaccaacatgggcgctgccagtgacctgggcgatggtttcatcaatgcgcgtatggacgccaagcgtcagaccataaccggaagcgttaatctgctcgatcagctctggtagctggttacggttgtaacgcaccacatgcagcaccggaccaaagacctctttttgcaattcggcaaagtcatccagttcgatcagcgtcggggcgacaaaggtgccgctttgccattcacgggcatcttcgctgttttcccgcaccgcctggaacaccggacggcctttgctacgcatggtctgaatatggcgctcaatattggctttcgcttcgctatcaatcactggaccgatatcggtggtcaggcgacccggattacccatccggcattcggccattgcgccgcgcagcattttcaacgtgtggtcggcaatctcatcttgcaggcacagcacgcgcagcgcgctacaacgctgacccgcactgtcgaacgcgctggccagtacatccacgacgacctgttcggtcagtgcactagaatcgacaatcatcgcgttcatgccgccggtttcagcgatgagcggaatagggcgaccctgagcgtccaggcggctggcgatattgcgctgcagtaacgtagcgacttcggtactaccggtaaacatcaccccgcgcacgcgatcatcacccgtcagttgcgcgcccacggtttcaccccgacctggcagcaattgcaccacgcctggcggtacacccgcttccagcaaaatggcgatcccttgcgcggcaatcagcggcgtttgttctgccggttttgccagcacgctgttacctgccgccagtgcggcggcgatctgcccggtgaaaatagccagcgggaagttccacggactgatacacaccacaggccctaatggacggtgggtttcgttagcgaaatcatcccgcacctgtccggcgtagtagtggagaaaatcgaccgcttcgcgcacttcggcaatggcgttactgaaggtttttccggcctcacgcaccagaataccaatcagttgctgcatctggctttccatcagcacggcagcgcggtgcaaaatcgctgcgcgttcagccggaggcgtggcaaaccagattggcgcgttattaaccgcactttccagcgcctgttctacttcacgcggcgtggcttcacgcacatagcccacaatatctttcggttccgcagggttaataacggggctcatctcacctgccgctaccggttgttccagcattggcaaggcctgccatttttgcagtgcactattgagcagggcagaggagaggctggccaggcggtgttcgttagcgagatccagccctgcgctgttgtcgcgcccgtgaccgtaaagatcgcgcggcaggggaattttcggatgcggtaatccagtttgcccttcctgttgcgccagtttttctacagcagtgaccggatcggcgaccagttcatccagtggcaaagaggtgtcggcaatacggttaacaaagctggtgttagcaccgttttccagcaggcgacgcaccagatacgccaacagcgtttcatgtgtgccaaccggagcataaatacgacacggacggttaagtttgccgtcggcaactttcccggggacctgctcatacagtggctcgcccataccatgcaggcactggaactcgtactgacccgggtagtagttctgccccgccagttgataaatcgccgccagcgtatgggcgttgtgcgtcgcgaactgcgggtagattagattcggcaccgccagcagctttttcgcacaggcgagataagaaacgtcggtatacaccttgcgggtataaaccggataaccttcaaggccgtccatctgcgcacgcttaatttcactatcccagtacgcgcctttcaccaggcgaatcatcagacggcgacggctgcgggtggcgagatcaatcaggtaatcgatcaccaacgggcagcgtttttgataagcctgaataacaaaaccgatgccgttccagcctgccagttccggctcgaaacagagtttttccagcagatcgagggagatctccaggcgatcggactcttcggcgtcaatgttgataccaatatcgtactgacgcgccagcagggtgagacttttcagacgcgggtaaagctcttccattacccggtcatactgggcgcggctataacgcggatgcagcgcgctcagtttgatactaatgcccggcccttcatagatgccacgaccgttagacgctttaccgatggcgtgaatcgcctgctgataggaaaccatatacgcctgtgcatctgcggcggtcagcgcggcttcgcccagcatatcgtaagagtaacggaaacctttctcttccagcttgcgggcattggctaacgcttccgcgatggtttcgccagtgacgaactgctcacccatcaggcgcatcgccatatccacacctttgcggatcagcggttcaccgcttttaccgataatgcggttcaggctgcgggagaggctggcttcgttatgggtggaaaccagtttgccagtaaacagcagcccccaggtggcggcattaacaaacagactcgggctacgaccaatgtgactctgccagttaccgttgctgattttgtcgcgaattaacgcgtcgcgggtggctttgtcgggaatacgcaacaacgcttccgccagacacatcagcgccacgccttcctggctactcaggctaaactcctgcaataacccctggaccatacctgcgcgaccactggcatttttttgattacgcagtttatcggccagctgatacgccagtttgtgcgcctgttcagcaactggctgcggcaggcgggcttgttccagcagcatagaaaccgcttcggtttccgggcggcgataggccgcggtgatcgcggcgcgggaaacgctctggggcaatatttgctcggcaaagtcgaggaatggctggtgtggttcctctgccggagtcggtgcttcatcgctctcattggccgcgccagaaagcagcgcaggtagctccggcagagtatcgctgttttccagttgttcgagataagaaaaaatcgcctgcttaattaaccagtgtggtgtgcgatcgatacgtgtcgcggcagacttaatacgctcacgcgtcgcgtcgtccagcttaacccccatggtggtggttcccatgccattactcctgttgttcagaaaggtgcaacttaacgttatcgtgaaatatccatgatgttgcaactttgtgcaaccatgttaaatgtgacatgcgtagcaagcttaaaaatgaatgaaatgttaataaaagaaatcgatatgacagggattaaaaaaataactcagactttttctctgcggcagttaacatttttgaaaggtgcaaccgcaaaaaatgtgagagagtgcaacctgatgaaaaatagtgtcgctgagcactaaaatttaatgtaaatggtgtgttaaatcgattgtgaataaccagcgcttccggcaggatacggtcgccctggtaaaacataaactctgttaccccgttccggtggcagatataacggcaagtttcgacattgccgataataattttttggagactttagatggctattagcacaccgatgttggtgacattttgtgtctatatctttggcatgatattgattgggtttatcgcctggcgaagtacgaaaaactttgacgactatattctgggcggtcgtagtcttgggccattcgtgacggcattaagcgcgggtgcgagcgatatgagcggctggctgttaatggggttgccgggcgctgtttttctttccgggatttccgaaagctggatcgccattggcctgacattaggcgcgtggattaactggaagctggtggccgggcggttgcgtgtgcataccgaatacaacaataacgccttaacactgccggattatttcaccgggcgctttgaagataaaagccgcattttgcgcattatctctgcgctggttattttgctgttcttcaccatttattgcgctagcggcattgtggcaggcgcgcgtctgtttgaaagtacctttggcatgagctacgaaacggctctgtgggcgggcgctgcggcgacgatcctttacacctttattggcggtttcctcgcggtgagctggactgacactgtacaggccagcctgatgatttttgccctgatcctgacgccggttatcgtcattatcagtgtcggtggctttggtgacagcctggaagtgatcaaacaaaagagcatcgaaaacgttgatatgctcaaaggtctgaactttgttgccattatcagtctgatgggttgggggctgggttacttcgggcagccgcacattctggcgcgttttatggcggcggattctcaccacagcattgtccatgcgcgtcgtattagtatgacctggatgatcctctgcctggcaggggcggtggctgtcggcttctttgggattgcttactttaacgatcatccggcgttggctggtgcggtaaatcagaacgccgagcgtgtgtttatcgaactggcgcaaattctgtttaacccgtggattgccgggattctgctgagcgcaattctggcggcggtaatgagtaccttaagttgccagctgctggtgtgctccagtgcgattaccgaagatttgtacaaagcgtttctgcgtaaacatgccagccagaaagagctggtgtgggtagggcgtgtgatggtgctggtggtggcgctggtggcgattgcgctggcggcaaacccggaaaaccgcgtgctgggcttagtgagctacgcgtgggcaggctttggcgcggcgtttggtccagtggtgctgttcagcgtgatgtggagtcgcatgacgcgtaacggtgcgctggcggggatgatcatcggtgcgctgacggttatcgtctggaaacagttcggctggctgggactgtacgaaattattccgggctttatcttcggcagtattgggattgtagtgtttagtttgctgggtaaagcgccgagtgcggcgatgcaaaaacgctttgccgaggccgatgcgcactatcatagcgctccgccgagtcggttgcaggaaagctaagggacttagcctgcggcggttttgtttggcttcagcagcgggttgcgctcccttaatgtgcctcgccatataaattgaatggtgcagggagcgcgcagggggcggccaatcgccgccgccccctgctgtcccggccttcggggaacgcttcagcgattttgacgccaccaacacccgagctgttattatgttccgggcaaaaagttagatttgataatcgcggatggacgaaattgcttgatacacccgcttatcagttttacatggaagctctgatgcattgagtctggacagttttgtcggctggatacggcgtttacgcggcatccggcaagaacacatggttctttgcaaacaatcccatctttctaccctggaataatcgtttatatcccttggcattacctctctttgtttacattccaacatcattttataaacattccgcttgtgtttttctttgccgtaatgataatcgctatcactgcgatttacttttctttgcatagattgactcagaaaaacgtttaagggtgggtggcatgtttgttccgtttctcattatgttgcgcgaaggacttgaagccgcgctgattgtcagtttgattgccagctatcttaagcgtacccagcgaggccgatggattgtgtgatgtggattggcgtgttgcttgccgctgcgttgtgcctgggcttgggtatcttcattaacgaaaccaccggcgaatttccgcaaaaagaacaggaactgtttgaaggtatcgtggcggtgatcgccgtggtgatccttacctggatggttttctggatgcgcaaagtgtcgcgcaacgtcaaagtgcaactggaacaggcagtcgatagcgcattgcagcgtggaaatcatcatggctgggcgctggtgatgatggtcttttttgccgttgcaagggaagggctggagtcggtctttttcctgctggcggcatttcaacaagatgtcgggatctggccgccgctgggtgcaatgctcggtcttgctactgccgtggtgctaggcttcctgctctactggggcggtattcgcctcaatcttggtgcattttttaaatggaccagcctgtttattctcttcgtcgccgcagggctggcagctggtgccattcgcgcatttcatgaagccggattgtggaaccactttcaggaaatcgccttcgatatgagtgcggtgctctcaactcactcgctgtttggcacgctgatggaagggatttttggctatcaggaagcgccgagcgtcagcgaagtcgccgtctggtttatttatctcatcccggcgctggtggcatttgctctgccaccacgcgcaggggcgacagcgtctcgctccgcgtaacaaatacgacgcaaactcttgcttagttacaacatactttaaagggatagtctcgtcatgaccattaacttccgccgtaacgcattgcagttgagcgtggctgcgctgttttcttctgcttttatggctaacgccgctgatgtgccgcaggtcaaagtgaccgtgacggataagcagtgcgaaccgatgaccattacggttaacgccgggaaaacacagttcattattcagaaccacagccagaaggcgctggagtgggagatcctcaaaggcgtgatggtggtggaagagcgggaaaatatcgcccctggctttagccagaaaatgacggcgaatttacagcctggcgaatacgatatgacctgcggtctgctgactaacccgaaagggaagttgatcgtcaaaggtgaggcaacggcggatgcggcgcaaagtgatgcgctgttaagtcttggtggtgcaattactgcatataaagcgtatgtcatggcggaaaccacgcagctggtgaccgacaccaaagcctttaccgacgcgattaaagcaggcgatatcgaaaaagcgaaagcactgtatgcaccgacgcgccagcactatgagcgtattgaaccgattgctgaactgttctccgatctggatggcagcattgacgcccgtgaagatgattacgagcaaaaagccgccgacccaaaattcactggtttccaccgtctggaaaaagcattgtttggcgacaacaccaccaaagggatggatcagtacgctgagcagctttataccgatgtggtcgatttgcaaaaacgcatcagtgaactggctttcccacctagtaaagtggtcggcggcgcagccggactgattgaggaagtggcagccagcaaaattagcggtgaagaagatcgctacagccacaccgatctgtgggatttccaggctaacgttgaaggcagccagaaaattgtcgatttgctgcgtccacaactgcaaaaagccaacccggaactgctggcaaaagtcgatgccaactttaaaaaggtcgataccattctggcgaaataccgtactaaagacggttttgaaacctacgacaaattgaccgatgccgaccggaatgcactgaaaggaccgattactgcgctggcggaagatctggcgcaacttcgcggtgtgctgggactggattaagcgttatgcagtataaagatgaaaacggcgtgaatgaaccgagtcgccgacgtttactgaaagtgataggtgcactggcgctggcgggaagttgtccggtcgctcatgcacaaaaaacgcaaagtgcgccgggtacgcttagtccggatgctcgcaatgagaaacagccgttttatggtgagcatcaggcagggatcctgacgccacaacaggccgcaatgatgctggtggcgtttgatgtgcttgccagcgataaagccgatcttgagcggttgtttcgcttgttgactcagcgttttgcttttctgactcagggcggagcagcaccagaaacgccaaatccgcgcctgccaccactcgattccggcattcttggcggctacattgcgcccgataatctcaccatcacgttaagcgtgggtcacagtttgtttgatgagcgctttggccttgcgccacagatgccaaaaaagctgcagaagatgacgcgtttccccaacgacagcctggatgcggcgttatgtcatggtgatgtgttgctacagatttgcgccaacacccaggacacggttatccatgcgctgcgcgatatcatcaaacacacgccggatttgctcagtgtgcgctggaagcgggaagggtttatttccgatcacgcggcgcgtagtaaaggcaaagagacgccgattaatttgctgggtttcaaagacggcactgccaatcccgatagccagaatgataagttgatgcaaaaagtggtgtgggtaacggcagatcagcaggagcctgcgtggacaatcggtggcagctatcaggcagtacgcttgattcagtttcgagtggaattttgggacagaacgccgctgaaagaacagcagacgatttttggccgtgataagcaaaccggtgcgccgctgggaatgcagcatgagcatgatgtgcctgattacgccagcgacccggaagggaaggtgatcgcgctggacagccatatccggctggcgaatccccgcacggcggagagtgagtccagcctgatgctgcgtcgtggctacagttatagtctgggcgtcaccaactccgggcaactggatatggggttgctgtttgtctgctaccaacacgatctggaaaaaggcttcctgacagtacaaaaaaggctcaatggcgaagcgctggaggaatacgttaaacctatcggcggcggttatttttttgcgctgccgggggtgaaggacgcgaacgattatttcggaagcgcgttattgcgggtttaatgtttttaggcggataaggcatttgtgcgcagatgcctgatgcgacgcttgcgcgtcttatcatgcctacaatcagtgcgggtttggtaggctggataaggcgttcacgccgcatccggcgatcgtgcactgatgcctgatgcaaatcctgctgaaagcacacagcttttttcatcactgtcatcactctgtcatctttccagtagaaactaatgtcactgaaatggtgttttatagttaaatataagtaaatatattgttgcaataaatgcgagatctgttgtacttattaagtagcagcggaagttcccggcagtgatagtcagtcactatggagatcgcggatggtaacgtcctgtactggacatgttttagataatcaacgcgccaccactcgcggagttttctcctccggtagtcatctcgtcactttgcattttcaacctcatcctttctttagttgtgttaccgacgccgtaaacggtgcgcgtagccgttttagcgcattttatccaaaagcaaactatggcttacaaggaagccaaccctctgatgttcgtgcgcataatcgcgctgccaacggcgcgtgtgatgaatacaaacaactcaaggtgctctccatgggaagacaaaaagcagtgatcaaagctcgtcgcgaggcaaaacgtgtgctgagacgggatagccgcagccataagcagcgtgaagaagaaagcgtcaccagccttgtgcagatgggcggcgtagaagccattggtatggcccgcgacagtcgcgatactagccccatcctcgcgcgaaatgaagcgcaattgcactatctgaaggctattgagagtaagcagctgatattcgccacgggcgaagccgggtgcggaaaaacctggatcagcgcagcaaaagcggcagaggccctgatacataaggatgtcgacaggattatcgtcacccgtccagttctgcaagccgatgaagatcttggcttcttacctggagatatcgcagaaaagtttgctccctattttcgcccggtctacgacgtgctggtccggcgcttaggggcttcctttatgcagtactgcctgcgaccggaaatagggaaggtggaaattgcgccgttcgcctatatgcgtggacgtacctttgaaaatgcagtcgtcattcttgacgaggcgcagaatgtgactgccgcgcaaatgaaaatgtttttaacccgcctcggggagaacgtgacggttatcgtcaacggtgatatcacgcaatgcgatttgcctcgcggcgtgtgctccggattaagtgacgcgctggaacgtttcgaagaagatgaaatggttgggatcgtccggttcggtaaagaggactgcgtacgtagcgcactttgccaacgtacgctgcatgcctacagttaagtgtgttatcggtgcagagcccgggcgaaccgggctttgttttgggtgttcccggtgtgtgcaatatacgaaaaaaaagcccgtactttcgtacgagctcttctttaaatatggcggtgagggggggattgactcgcttcgctcgccctgcgggcagcccgctcactgcgttcacggtctgtccaactggctgtcgccagttgtcgaaccccggtcggggcttctcatccccccggtgtgtgcaatatacgaaaaaaaagcccgtactttcgtacgagctcttctttaaatatggcggtgagggggggattcgaacccccgatacgttgccgtatacacactttccaggcgtgctccttcagccactcggacacctcaccaaattgtcgttcctgtcttgctggaacgggcgctaatttagggaaatcatgacctgaggtcaacaaactttttgaaaaaatcgcgcgtttattcaaacttcaatcaatgtgtggttttaataagcgaaatctgctttttttgccaccgaccacggatttgttatgctggtggcctttgtagatcataacgataagtgcgaataaatttcgcacaacgcttttcgggagtcagtatggatatcatcttttatcacccaacgttcgatacccaatggtggattgaggcactgcgcaaagctattcctcaggcaagagtcagagcatggaaaagcggagataatgactctgctgattatgctttagtctggcatcctcctgttgaaatgctggcagggcgcgatcttaaagcggtgttcgcactcggggccggtgttgattctattttgagcaagctacaggcacaccctgaaatgctgaacccttctgttccactttttcgcctggaagataccggtatgggcgagcaaatgcaggaatatgctgtcagtcaggtgctgcattggtttcgacgttttgacgattatcgcatccagcaaaatagtagccattggcaaccgctgcctgaatatcatcgggaagattttaccatcggcattttgggcgcaggcgtactgggcagtaaagttgctcagagtctgcaaacctggcgctttccgctgcgttgctggagtcgaacccgtaaaagctggcctggcgtgcaaagctttgccggacgggaagaactgtctgcatttctgagccaatgtcgggtattgattaatttgttaccgaatacccctgaaaccgtcggcattattaatcaacaattactcgaaaaattaccggatggcgcgtatctcctcaacctggcgcgtggtgttcatgttgtggaagatgacctgctcgcggcgctggatagcggcaaagttaaaggcgcaatgttggatgtttttaatcgtgaacccttaccgcctgaaagtccgctctggcaacatccacgcgtgacgataacaccacatgtcgccgcgattacccgtcccgctgaagctgtggagtacatttctcgcaccattgcccagctcgaaaaaggggagagggtctgcgggcaagtcgaccgcgcacgcggctactaataaagcatcaggattcctgctatccttggcgggaattgaatacaggagagagttatgtatcccgtcgaccttcatatgcataccgttgccagcacacatgcatatagcacattaagtgattacattgcccaggccaaacaaaagggcattaaactttttgcgatcaccgatcatggcccggatatggaagatgcgccgcatcactggcacttcattaacatgcgtatctggccgcgagtggttgatggggtagggatcctgcgcggcatcgaagctaacattaaaaatgttgatggtgaaattgactgcagcggtaaaatgtttgacagcctggatctaattattgccggttttcatgagccggtttttgcgccacatgataaagcgaccaatacacaagcgatgatcgccactatcgccagcggcaatgtgcatataataagccatcccggaaatcccaaatatgaaatagatgtgaaagccgttgctgaagcagccgcgaaacatcaggtggcgctggaaatcaataattccagttttttacacagtcgtaagggcagtgaagacaactgtcgtgaggtagccgcagcggtacgtgatgctggaggttgggtggcattaggcagcgattctcacaccgcgtttaccatgggggaatttgaagagtgtcttaaaatcctcgacgcggtagattttccgccagagcgcattttgaatgtttctccgcgccgcttactgaacttccttgaatctcgcggtatggcaccgattgcggaatttgcagacctttaattactagtaatggaaatatattaatgaacgagttttctatcctctgtcgtgtgctgggtagcctctattaccgccaaccacaagatcctttactggtgccgctgtttaccctgattcgtgaggggaaactggctgcgaactggccactggagcaggatgagttgctgacacgtttgcagaaaagctgtgatatgacgcaagtctctgccgattacaatgcgttgtttatcggcgatgaatgtgctgtgccgccatatcgtagcgcatgggttgagggcgcgacggaagcggaagtgcgcgcttttctttctgagcgagggatgccattagcggatacgccagccgatcacatcggcacattgctgctcgcagcttcctggctggaagatcagagtacggaagatgagagcgaagcactggaaacactgttcagtgagtatctgttaccctggtgtggtgcgttccttggcaaagtggaggcccatgcaaccacgcctttctggcgcaccatggcaccgctaacccgcgatgccattagtgcaatgtgggacgagctggaagaagattctgaagaataagtgtgatctacgtcactcataactgcaacggataatttgttgttgcataaaatgtgtgctcgatctcattcatggccgcgttttctgctatcatgcgcggcatgaacatacttctctctattgcaatcacaacaggcattctctccggtatctggggatgggtggctgtttccctgggcttactaagctgggcgggcttcctgggctgtacggcctactttgcctgcccgcaaggtgggctgaaagggctggcgatctccgctgcaaccctgcttagtggcgtggtgtgggcgatggtcattatttacggtagtgcactggcaccacatctggaaattctcggttatgtcataaccggtattgtcgcgtttctgatgtgtattcaggccaaacagctgctgcttagttttgttccggggacgtttataggcgcatgcgcgacgtttgccgggcagggtgactggaaactggtgttacctagcctggcgcttgggctgatatttggttacgcaatgaaaaacagtggcctgtggctggcggcgcgtagtgcaaagacggcgcaccgtgagcaggaaatcaaaaataaagcgtgaggggcactcacgctttcgcttaaacagtaaaatgccggatgataattccggcttttttatctgtcaggattccggtggaacgctcatatggcggtatttcaccagaatgtcattctgccgttctgctttattttgcaaatcccacagaccacggtcgataccatcattaatcaggaaaatgacccctgtttcgatagcgctcatcaggcacagcataacaggttcgttgctggtgtaacccacttccccttcaagcaagcgctggtagtcaataaagcggaaaaccccggcctgaacttcataggaaagtatcgtcttactggtgttcacgctagaaaggatctcgccggtactcacattgacgacgcgcaggttcacggcaatctgatcgagctggtattgcgtgtcggcaccgatgccaaaatatcttgccccaaccccgccagatttgacgttgctttcataaccgataatgctaccttcaaccatgatatttgccgccgttaaagattgcagcgggattcggttattaatggcaaccgtgccgttttcttgtgccgcacgaataatcttgcgctcgttaagcaggttttgtaagccctggcgctccagcggtataaaccagcgagaatctttcagtgccgtgaccagcattgccgtggcgctttgcggaacagcagtggagaagttacttgccgggtagggtttaaattgcccggtttcgtcctgaatgttgtatacgctaacaaagattttacccgtcggcgctggcagatgggtcaaatctttgtagctctgagcacgaggcattaatgtcggtctggcggcttctttaggcggggcggttaagcatccgctcagtaacatgacggcaaccaaaagaaataagcgctgcatgattattttccttatgaagctggggcttaaaaatcggtactgttattttgtaaaccgctaacctggatggtgctggtttgtccggttttacgatctgtcacgttcaactgcaattgaccatcgcggttggcaatatcgacaatataatcgttggtcaccatgcggcccggtttaccggtattaatattgctcagtagcccacctaaaatttgactctggatggcctgagtaaagttatctaacgcactgggtgtttcaataccaaagtcatcgttatagctcggatctttataagagttttgggcctgagcgctatttaataaaaaagcgccattatttgggttaccaccaaagtttggattacggaactggaaagtcatggttccagcccaacttaatgggctaataagcatgagtagaactactgcatgtttgacacgcattgcagcctccgaacaattttttatttagaattcatcatgcgccaaatcgcccgtacttaataacgcctgatttatctggcgacgatttagtgcttcttcagtttgaatcagtgcaaagacgacagttttctcgaagtctcttttcaacggaaataaaaaagtctggaaaataacgtcctgattgaccgttatagtgatccagcttccccatcgtgcactgggcctttcattaatcgttaagttacccgtatagtcactttcccatttatcactaaaggctcggtaaaaatcatggccaatagaactaacagtatggtcagttagcaatcccgggacttctacctcaacggcgtgaagattccctgcggcgaacagaaattctgccgccacaatccagcgtaaataacgtttcatggctttatcgcctgaggttatcgtttgcccaggaaaccgcttgtgtccggttttttacggctatcttcttgaaaagattataaagatgcgttttaaccgtattttcgctgatgaacaagctacgagcgatctcgttattagacgcgccgatacgcagcttattcaggatctctttttcccgatgagtaaggagggcactttccgtgctgttataacgatagttaccactatgcgtaatcaggtagctggcaagcttttgcgtaaagtagcattcgccgcgcaggacgccttgcaacccattgacaacacgttcttgatcctccatggaataaaaaacgccgttgatatgaggccagttttcaatgtcgcggtacgggtaatcttcaggcgtatttagcaacaatattttgatattgttgtttttcctgctcaaagtatcctgccaataatggataagctttttatccgcttccatcatatccagaagaataatagagccactagagatatcgtccagagaacgttgaatattatgtaattttcctgtaattgccaggctttgtttaaggtgctgcaagagagctgtcgcctgcaaagaagatttagtgatcaacaataatgtatgaccatgaatactatggacttcattaaacatgatgaaaccccgctttttttattgatcgcacacctgacagctgcctctaaaatagaagcaccagaagtactgacagatgttgcactgctgtgtgtagtaataaatcagccctaaatgggtaaaatataaaactaatggattacatctgatttcaatctagccattacaaatcttaaatcaagtgttaaacatgtaactaaatgtaactcgttatattaaaatgttaaccttaaggttttattaagtttagaaatgatagaaaagttgtacatttggtttttattgcacaattttaaaaaatcatacaaatggtgataacttactaataatgcatataaaaaatatttcggtgtagtcctttcgtcatgtaaaacgttcttgttttttctccacacctccgtggacaattttttactgcaaaaagacgaggtttgtcacggcttgtgcgcaagacatatcgcagcaatcagcgacgggcaagaagaatgactgtctggtgctttttgatagcggaaaacggagatttaaaagaaaacaaaatatttttttgcgtagataacagcgtatttacgtgggttttaatactttggtatgaactaaaaaagaaaaatacaacgcgcgggtgagttattaaaaatatttccgcagacatactttccatcgtaacgcagcgttaacaaaatacaggttgcgttaacaaccaagttgaaatgatttaatttcttaaatgtacgaccaggtccagggtgacaacatgaaaaacaaattgttatttatgatgttaacaatactgggtgcgcctgggattgcagccgcagcaggttatgatttagctaatagtgaatataacttcgcggtaaatgaattgagtaagtctagttttaatcaggcagccataattggtcaagctgggactaataatagtgctcagttacggcagggaggcagtaaacttttggcggttgttgcgcaagaaggtagtagcaaccgggcaaagattgaccagacaggagattataaccttgcatatattgatcaggcgggcagtgccaacgatgccagtattagccaaggtgcttatggtaatactgcgatgattatccagaaaggttctggtaataaagcaaatattacacagtatggtactcaaaaaacggcaattgtagtgcagagacagagccaaatggctattcgcgtgacacaacgttaatttccattcgacttttaaatcaatccgatgggggttttacatgaaacttttaaaagtagcagcaattgcagcaatcgtattctccggtagcgctctggcaggtgttgttcctcagtacggcggcggcggtaaccacggtggtggcggtaataatagcggcccaaattctgagctgaacatttaccagtacggtggcggtaactctgcacttgctctgcaaactgatgcccgtaactctgacttgactattacccagcatggcggcggtaatggtgcagatgttggtcagggcagtgatgacagcagtatcgatctgacccaacgtggcttcggtaacagcgctactcttgatcagtggaacggcaaaaattctgaaatgacggttaaacagttcggtggtggcaacggtgctgcagttgaccagactgcatctaactcctccgtcaacgtgactcaggttggctttggtaacaacgcgaccgctcatcagtactaatacatcatttgtattacagaaacagggcgcaagccctgttttttttcgggagaagaatatgaatacgttattactccttgcggcactttccagtcagataacctttaatacgacccagcaaggggatgtgtataccattattcctgaagtcactcttactcaatcttgtctgtgcagagtacaaatattgtccctgcgcgaaggcagtagtgggcaaagtcagacgaagcaagaaaagacccttagtttgcctgctaatcaacccattgctttgacgaagttgagtttaaatatttccccggacgatcgggtgaaaatagttgttactgtttctgatggacagagtcttcatttaagtcaacaatggccgccctctagtgaaaagtcttaatttgttgaaatatcgagcataagatgaatctggagagaatggtctgctgcgaatcagccaacctgaaagtatggataacacaaccctcaaggatgactaatcattgaggaaatagaataaatgttcagaccttttttaaactctcttatgctcggcagtttgttttttccttttattgccattgctggaagcaccgtgcaagggggcgtgatccatttttatggccaaattgtggaaccggcatgtgacgtcagcacccagagtagtcccgtagaaatgaactgcccacagaatggttctattccgggcaaaacctactccagcaaagcgttaatgagcggcaatgtcaaaaacgcgcaaatagccagtgtaaaagtgcagtatcttgataaacagaaaaagctggctgtaatgaacatcgaatataactaagtttctgaacaactcacgttgctgagcagaaaaatgcgatttaaccaaaaagcctgctgtacacttaagaaacaagaaggtgtaaggaggcgttatgaaaacgcgtattcatgttgtgcagggtgatattaccaaactggccgttgatgtgattgtgaatgcggctaatccgagtttaatgggaggcggcggcgtcgatggggccattcatcgcgcagcgggtccggccctgctggatgcttgtttaaaagtcaggcaacagcagggcgattgccctacggggcatgccgttattacgcttgcaggcgatcttcccgctaaagccgtagtgcacaccgtcgggccagtctggcgtggtggtgaacaaaacgaagaccagcttttgcaggatgcctatctcaatagcctacgactggtggcggcaaacagctatacgagtgtggcttttcctgcaatcagtactggggtttatggttaccctcgtgcggcagcggctgaaatcgcagtaaaaaccgttagtgaatttattacccgtcacgctttacccgaacaggtatactttgtctgttatgatgaagaaaacgcccacctctacgaaagactccttacccaacaaggagatgaatgatttgccccggctggcgagcgcggtgctgccactgtgtagccaacatcccggtcagtgtggcctttttcctctggagaaaagtctggatgcgtttgccgcccggtatcgtctggccgaaatggcagagcatacgctcgatgttcagtattacatctggcaggacgatatgagcggtcggttactgttttccgccctgttagccgcagcaaagcgtggcgttcgcgtccgtttgttgctggacgacaacaatacgcccggacttgacgacattttacgcttgcttgacagtcatccacgcattgaagtccggctttttaatcctttcagctttcgcttgctgcgtccgcttggttatatcaccgacttttcccgtcttaatcgccgtatgcacaataaaagtttcactgtcgatggcgtggtgaccctggtgggaggacgaaatattggtgatgcctattttggagcaggggaggagccactttttagcgatttagatgtcatggcaataggacccgtggtagaggacgttgccgatgatttcgcccgctactggtattgcaaaagcgttagtcccttacagcaggtgctggatgtcccggagggtgaaatggcggatcgcatcgagttacccgcctcctggcataacgatgccatgacgcatcgttatttacgcaaaatggaatccagtccatttataaatcatctggttgatggaacattgccgcttatctgggcgaagacacgtttattaagtgatgatccggcgaaaggggagggcaaggcaaaacggcatagtctgttaccgcagcgcctgttcgatatcatgggcagtcccagtgaacgcatcgatattatctcttcctattttgtaccgacacgcgcaggtgtggcgcaactcttacggatggtgagaaaaggggtaaagattgcgatcctaaccaattctcttgccgctaacgatgttgctgtcgtccatgccggatacgcgcgctggcgcaaaaaattgctccgctatggcgtggaattatatgaactcaagccgacgcgtgaacaaagtagtacgttacacgatcgcggcataaccggtaattccggagccagcctgcatgctaaaacctttagcatcgatggtaaaacggtgtttatcggctctttcaatttcgatccgcgtagtacattgctcaatactgaaatgggcttcgtgatagagagcgaaacgctggcacagttaattgataaacgctttattcagagccagtatgatgcggcctggcagctccgtctggacaggtggggacggatcaactgggttgatcgtcatgcaaagaaagagattattctcaaaaaagaacccgccaccagtttctggaagcgggttatggtcagactggcgagcatattgcccgtggaatggttattgtaaatgtggcttaacgggctggtgctttatcgttctcacgcttaacaaccggtttaccagagaacaaaaacttcagtaacgggatgcgcaaatgaatttcatacagaattatcgcaatccctactacaaatatcaggccacagagaaaaccaagccagttggaggtgatgtgcggtgtaatgtatgcgccgaaaaacagcgttaacgggtggtgaaccagatagataaacaggcttgcgttaacaaaataagtcacccgcgcactctggaagttaagcaaacggtggccaaaggagaagaccacattcaccatccacagaccgaggaccatggtgatcacgctctcggtttcgtacatccaggcatcgccactgccatagcgctggttgagtaaataagcgacaaacgccaatgctgctgcaagggtacagccacgagacggcgtggtaaacaaggctttaagatgagggaaaatgaaagccagtgcgccgaggataaagaacggcaaataaaacagcgtttgcatgacaataaaattgaacatgccattactcagaatgggcggatacacaataaaaatcgttcttcttattaccgcataaccgatgccgaggcataaaaaaatcacgcttagttttaccatgctgaattttttattcgttttatcagaattttctaaattatttctgatgcgcttaaatatccatacgcacagcgtcgtcatgaccactaacaccagtaaaaaccacaggtgacttattaattcccaggccaacgtattatatttgtcatacaaactcagcccaggccaactttccgcttttcctttgacatattgcagcataataaattgcggtaatgtcagtagggggatggctgttaacatcgggatacctacacgttcgacacgtactttccaccattttttcaagggatagcgtaaaaaaagcatgtaggaaaagtagccggatataacgaaaaatacctgcatgcggaagctgtggatgaagtcattaaaaagggtcagccacaaactactttcggcgctattcacatgccatgtatggctgctatagattaaagaaatatgaaaaggtatccctaacaacatcagccaggcgcggatggagtcgaggaaatattcacgttgcgcgggtactgggttcatatatggttaactaatctcggatttttcgtcttatccctgtcgggttatgcctttaggcttgttgccatagtgacaccgacctgaccgcgccaggcgcaggcttcaaggtttttatgcatagcatcatcgctaccactaaccagaatggaagcgtctgtaagacggttgataaataaatttgctggcaaaccctacacgaagtcgatgcttctgtctttaggagaagcacggaaagtgaaaacggttgcaatcaggtgcttaatccatgagccagcgtgctgaacgataccgggattctgttgtcggaatggctggttatccattaaaatagatcggatcgatataagcacacaaagggggaagtgcttactaattatgaaacataaactacaaatgatgaaaatgcgttggttgagtgctgcagtaatgttaaccctgtatacatctagtagctgggctttcagtattgatgatgtcgcaaagcaagctcaatctttagccgggaaaggctacgagacgcccaaaagcaacttgccctccgttttccgcgatatgaaatacgcggactatcagcagatccagtttaatcatgacaaagcgtactggaacaatctgaagaccccattcaaactcgagttctaccatcagggtatgtacttcgataccccggtcaaaataaatgaagtgactgccaccgcagtcaaacgaatcaaatacagcccggattatttcactttcggcgatgttcagcatgacaaagatacggtaaaagaccttggctttgccggttttaaagtgctttacccgatcaacagcaaagataaaaacgatgaaatcgtcagcatgctcggggccagctatttccgcgtgattggtgcaggtcaggtttatggcctttctgcccgcggcctggcaattgataccgccttgccaagcggtgaagaatttccgcgcttcaaagagttctggatcgagcgtccaaaaccgactgataaacgtttaaccatctatgcattgcttgacagcccgcgtgcgacaggtgcttacaaattcgtggttatgccagggcgtgacacggttgtggatgtgcagagcaaaatctatctgcgcgataaagtcggcaaactgggggttgcaccgttaaccagtatgttcctgtttgggccgaaccaaccgagccctgcaaataactatcgtccggagttgcacgactctaacggtctctctatccatgccggtaatggcgaatggatctggcgtccgttgaataacccgaaacatttagcggtcagcagcttctccatggaaaacccgcaaggctttggtctgttgcagcgcggtcgtgatttctcccgctttgaagatctcgatgatcgttacgatctccgtccaagcgcatgggtgactccgaaaggggagtggggtaaaggcagcgttgagctggtggaaattccaaccaacgatgaaaccaacgataacatcgtcgcttactggacgccggatcagctgccggagccgggtaaagagatgaactttaaatacaccatcaccttcagccgtgatgaagacaaactgcatgcgccagataacgcatgggtgcaacaaacgcgtcgtagtacgggggatgtgaagcagagcaacctgattcgccagcctgacggtactatcgcctttgtggtcgattttaccggcgcagagatgaaaaaactgccagaggataccccggtcacagcgcaaaccagcattggtgataatggtgagatagttgaaagcacggtgcgctataacccggttaccaaaggctggcgtctggtgatgcgtgtgaaagtgaaagatgccaagaaaaccactgaaatgcgtgctgcgctggtgaatgccgatcagacgttgagtgaaacctggagctaccagttacctgccaatgaataagacaactgagtacattgccgaagactgatatccgcgccgttcatcaggcgctggatgccgaacaccgcacctgggcgcgggaggatgattccccgcaaggctcggtaaaggcgcgtctggaacaagcctggccagattcacttgctgatggacagttaattaaagacgacgaagggcgcgatcagctgaaggcgatgccagaagcaaaacgctcctcgatgtttcccgacccgtggcgtaccaacccggtaggccgtttctgggatcgcctgcgtggacgcgatgtcacgccgcgctatctggctcgtttgaccaaagaagagcaggagagcgagcaaaagtggcgtaccgtcggtaccatccgccgttacattctgttgatcctgacgctcgcgcaaactgtcgtcgcgacctggtatatgaagaccattcttccttatcagggttgggcgctgattaatcctatggatatggttggtcaggatttgtgggtttcctttatgcagcttctgccttatatgctgcaaaccggtatcctgatcctctttgcggtactgttctgttgggtgtccgccggattctggacggcgttaatgggcttcctgcaactgcttattggtcgcgataaatacagtatatctgcgtcaacagttggcgatgaaccattaaacccggagcatcgcacggcgttgatcatgcctatctgtaacgaagacgtgaaccgtgtttttgctggcctgcgtgcaacgtgggaatcagtaaaagccaccgggaatgccaaacactttgatgtctacattcttagtgacagttataacccggatatctgcgtcgcagagcaaaaagcctggatggagcttatcgctgaagtcggtggcgaaggtcagattttctatcgccgccgccgtcgccgcgtgaagcgtaaaagcggtaatatcgatgacttctgccgtcgctggggcagccagtacagctacatggtggtgctggatgctgactcggtaatgaccggtgattgtttgtgcgggctggtgcgcctgatggaagccaacccgaacgccgggatcattcagtcgtcgccgaaagcgtccggtatggatacgctgtatgcgcgctgtcagcagttcgcgacccgcgtgtatgggccactgtttacagccggtttgcacttctggcaacttggcgagtcgcactactggggacataacgcgattatccgcgtgaaaccgtttatcgagcactgcgcactggctccgctgccgggcgaaggttcctttgccggttcaatcctgtcacatgacttcgtggaagcggcgttgatgcgccgtgcaggttggggggtctggattgcttacgatctcccgggttcttatgaagaattgccgcctaacttgcttgatgagctaaaacgtgaccgccgatggtgccacggtaacctgatgaacttccgtctgttcctggtgaagggtatgcacccggttcaccgtgcggtgttcctgacgggcgtgatgtcttatctctccgctccgctgtggtttatgttcctcgcgctctctactgcattgcaggtagtgcatgcgttgaccgaaccgcaatacttcctgcaaccacggcagttgttcccagtgtggccgcagtggcgtcctgagctggcgattgcactttttgcttcgaccatggtgctgttgttcctgccgaagttattgagcattttgcttatctggtgcaaaggaacgaaagaatacggcggcttctggcgcgttacattatcgttgctgctggaagtgcttttttccgtgctgctggctccggtacgcatgctgttccatacggtcttcgttgtcagcgcgttccttggctgggaagtggtgtggaattcaccgcagcgtgatgatgactccacttcctggggtgaagcgttcaaacgccacggctcacagctgctgttagggttagtgtgggctgttgggatggcgtggctggatctgcgtttcctgttctggctggcaccgattgtcttctcgttgatcctgtcaccgtttgtttcggtgatttccagccgtgccaccgttggtctgcgcaccaaacgctggaaactgttcctgatcccggaagagtattcgccgccgcaggtgctggttgataccgatcggttccttgagatgaatcgtcaacgctcccttgatgatggctttatgcacgcagtgtttaacccgtcatttaacgctctggcaaccgcaatggcgaccgcgcgtcaccgcgccagtaaggtgctggaaatcgcccgtgaccgccacgttgaacaggcgctgaacgagacgccagagaagctgaatcgcgatcgtcgcctggtgctgctaagcgatccggtgacgatggcccgtctgcatttccgtgtctggaattccccggagagatattcttcatgggtgagttattacgaagggataaagctcaatccactggcattgcgtaaaccggatgcggcttcgcaataaaaacgtagttgcctgatgcgctacgcttatcaggcctacatcgttcctgcaatttattgattttgcaagactttgtgggtcggataaggcgttcacgccgcatccggcaaaaacaacgagccaataaaaataccggcgttatgccggtatttttttacgaaagaggtatcaaatgcgtttaattgtggtgagcatcatggtgaccttgctgagtggctgtggcagcattattagtcgcactataccggggcaggggcatggcaaccaatattatcccggtgtgcaatgggatgtgcgtgactccgcctggcgttatgtcacgatccttgatctgccattctctctggtttttgatactttactgctgccgatcgacattcatcatggcccgtatgagtgattaacgttcatcccactcatcagctgctgcgcgtccttcctcggtatccagcggtggctcaagctgaaattccccctcgtcccattcatgtaatgtattctcttcctgccactcctggcgtatctctatctcatcatagtcgccatcaaaaacactttgcgcggcttcaccgctaagcataggtaaacattcaccttcttccccttcgtcggcaaaaaactcaacttgccacatgatgtcgccgtcctgcaaaacgtatttttgggcattgaactgttgcacattcgcatcttcggcgtcgatgccggggttgtctgcaagaaattcttcgcgtgcagcgtcaatggcttcttcaagcgttgcgtacatggtcatcacgattctccctttgagttgatgaggtttcagggaaaaggatagctgattctccgcttttgcaagtatgaaaggcgaaaaatcagttgcttacctggggtattcgacgacgacgtagactgttccaactatagactgcgttgaataacactacgccagcggtgacgagaaataccgctctgaaaccgtagttcgcactaatcgctgctcccatcaatggtccggtaacgttgccaatatcacgaaagctttggttatagctgaagatacgcccggcgatctggttgctgctgttgtaaaccaacagtgtctgtacggcggggagtagtgcaccatcggcggcaccgagcaaaaaacgtaaaatcccaagttgcaatggcgtctgaacgtaagacattgggatcaacagcagtacagaaaagatcagcgctgtaatcaggatcttttcgggtccgattcgatcgccaagtttgccgagtcgtggtgcacttagcagagccgccacgcctggcacgctggcgatcatgccactgataaaggcgacgttactgacgttacccgccagttcgcggacatacagcgtcagaatgggggcaatactgcccgtcgccacctggatgattaacgtagtgacaaacaggctgagtaccagtttcgggtttttaagacttgtcaccacttcccgcatgtgcagcatctcttttttgctgaccggctggaatttttctctgatgcaaaacagggtgacgaaaaagcagagtatgagcacactggcggtaataaagaataccggacgtaagccgtagctatcggcgagcaggccgccagccattgggccgagcaacgcaccactaacgccgcctgtggagagcgtacccagcgcccagccgcttttattacgcggtacttgtgtggcgataagagcattagcgttggggacaaatccgccaagtaacccaagaagcgcccgcaggatcaaaaactgccagatattttgtgccagccccatcaacaccatcacgatgcccatgccgagggcagagcgtaatagcatgagttttcggcctttacggtcggcgagtccaccccaaaacggactggcgatggcgctaaataaaaatgtaatgctgaagacaataccggaccacatattcagggcggagtgaccggtaacgccaagctgctcaacgtagaggggtaagaagggcattaccagactgaaggcggcaccggtaagaaaacagcctagccaggcgacgatcaggtttcgtttccagtttataggggtgtcattttcacagggactcatagcaatccgctgttggtgcgccaggcgcggtgaacataagaagaaaagataagcacactaattatgcgcccgacttccagggggcgcaatccagagagcttttatcgctaaatcagggggatttgctgtggtaatgccggatgccattctgaagcatccggcatgggagatttaatagcgactaggaacgccttccgggcgtgttttaaagcgacggtgtaaccacatatactgctctggtgccatcatgatgcatttttcgaccactttgttcatccacgcggcggtagtttcggcatcatccagtggcggagaacactctggcggcagcataatcaattgataccctttgccatctggcttacggcgtggaacgaagggcaccagacatgcgccggacatccgtgccagcatccaggttccggtcgtggtcgcagcctgctcaacggcaaacaacgggacgaaaacgctactgcgcgggccgtaatcatgatccggtgcgtaccagaccacttcgccttttttcagggctttaatcatgccttttaaatctttgcggtcgagcatgcttttattactgcgcaaacggccccaggtttgtagccagtcaatcagtggattatcgttcgggcgataaacgccaatacccggttcctgcataccaaactgccgcgcacccagctccagtgtcagaaaatggatgccaactaacaggatgccgcgtttttgcgcctgcacgtcacgaatgtgttccatgccgatcacttccgtccagcgggcgattcggcggtccggccagaaccacgccatgccggtttccatcaggcccatgccaacggattcgaaattcttcaccaccattttacggcgttcttgttcgctcatttccgggaagcacagttccaggttgcgatgcacaatttttgcgcgtcgtttcataaaacgtaacgccagttttcctaatccacaaccgaggcggtagataaccgggtagggcaattgcacgactaaccaaagtacgccaatacccaaccaggttaaccaataacgcggatgaagcagtgcggtggagaacttgggtagattcgtcatatcaatcctgtttttcaacctattcgggcaattgtatgtattgtcgcattttttcgcccgcaaccaaaatttgtggctgaagactgggcgaaattgccgcgcttgtaaataacaaataatttttaatgcgcaaatgtagcgtaaaatgtgtggatgttaattatcgataattgctatatcatgccgcggatttttactttcccatctcgcaggaaccgtacaccatgccagtgttacacaaccgcatttccaacgacgcgctaaaagccaaaatgttggctgagagcgaaccgcgaaccaccattagcttttacaagtatttccacatcgccgatcctaaggcgacccgtgacgctttatatcagctgtttaccgcgctgaatgtttttgggcgagtgtatctggcgcatgagggcattaacgcgcaaatcagcgtacctgcgagcaatgttgaaacatttcgcgcgcagctctatgccttcgacccggctttagagggtttacgcctgaatatcgcgttggatgatgacgggaaatccttctgggtactgcgcatgaaggtacgcgatcgcattgttgccgacggtattgacgatcctcactttgatgccagcaatgttggtgagtatctgcaagcggcggaagtgaacgccatgcttgacgatcccgatgcactatttatcgacatgcgtaaccactatgagtatgaagtggggcactttgaaaacgcgctcgaaattccggcagataccttccgtgagcagctgccaaaagcagtcgagatgatgcaggcacataaagataaaaaaatcgtcatgtactgcaccggcggcattcgttgtgaaaaggccagtgcctggatgaaacataacggattcaacaaagtctggcatatcgagggcggaattattgaatacgcccgtaaggcgcgcgagcagggcttgccggtgcgttttattggcaaaaattttgtttttgacgagcggatgggcgaacgtataagcgatgagattatcgcgcattgccaccagtgcggcgcgccgtgcgacagccataccaactgtaaaaatgatggctgccacctgctgtttattcagtgtccagtatgcgcggaaaaatacaaaggttgttgtagtgagatttgctgcgaagaaagcgcgttaccgccagaagaacagcgacgccgtcgggcaggacgtgaaaatggcaataagatctttaataagtctcgtggacgtctgaatacaacactgtgcattcctgatccaacagaataaatatcattgccggatgcgtgccatccggcaacatttcacgcttacttctgctgtacgccttccacactaataatcagatccacttcctgagaagctggacctaaatctgtcttgatattgaagtccttgagcttaattttgccttcggcctcgaagcctgcacgtttaccaccccatgggtcgtcgccctgaccaattaatttcgcttccagcgtgacgggtttggttacgccattcagcgtcagatcgccggtaatatccagttcgtcaccgtctttcttcacgctggtggaggtgaatgttgcctgtggatattttgcggtattgaggaaatctgcactgcgaagatgtttatcgcgttcggcgtgattagtatcgacgctggtggtgttaattgtcacattcactttatcggcagccggatttttttcgtcaaaggtaaaagtaccgtcgaaatctttaaaggtgccgtataaccagctatagccaaggtgctggatgcggaaattaacaaaggcgtgctgaccttctttgtcaattttgtaatcggcggcaaccgcactaccggcagagaacatcagggacgcgaaggttaaaccaagcaggctttttttcattttttatactccatagtcagaactgctctttcccagcatgcgcttcagagtgtcgtctttatcgatgaaatgatgcttcagggccataaatccgtgcataacggacagtactacgacgctccacgcgagccaaaaatgcagggcaccggcaaagtctgcctgtgcgccagcgtcggcaagggtcgcggggacgtcaaaccagccaaaaacgctgatcggtttaccatcggcagtactgatcagatagccgctgatgccgatggcgaaaagcaataggtacaatgcgagatgtccagctcttgcggcaagacgagtcatggggctataactcggcagcggacccggcggtggagatatgacacgccacagaacgcgaataaccagccccatcattaacaaaataccgatgcttttatgcagttcgggtgctttgtgataccagccatcgtaataactgagcgtgaccatccacagacctaaagcaaacatgccgtagacaataattgcgcttagccaatggaaggccgcagatataacaccatagcgttcaggggtatttgtgaaactcataagtgcatccaaaacgaatttgcgagagaaagaaaatggcgtgtcggagaatgaattgcaacacaaaaataacaaattgaatgatatttatttttatttcaataattttgaattaataatgaaagaatcttcataagtttagtgggttcagcatcagagatgtctggtgagtgctgtagaagcaggaataatctcattcaatttttcacgctaaatgaaagggagattaaatatttgtcagtttatgtcagtgcggaaaattaaaaataaaacacatagatcagatccataattgccaacaatccccagagaaaaagataaagcatcagatgctcgcgaatattattgatgagatagtgcaacagccgacgcattaaatactcctgtaaaaacggcctcattctggaggccgtaatgatgattattggaagcgggaaagcctgaatggcgtcaaatcaaaatcgctttttttgtcttgcgcaaaatcggcagctatttcccctaaaacactcgcaaatttaaaaccgtgcccactcaggccggtaatgagcagtgtattatcgtggccgggtagggtatcgataataaaatcttcgtcagggctattatcataggtgcaggcagcgccgtacaggcagcaaccgatacccggcaatacattgcgcaagaacgggaaggcttcactcccatcactggccacttccgcaaacggaacacgttcatccgcactatggataacctggcctccgttatgtttgccaatcttcaacgcgtcgttttctgccggaaaaccataatattgatcgccattgggcagttcaccggtaaacgccgggaatttattcttcacgctatagcggccatcggcctgataccaggcaaatactttgcgtacgggctggacaggcagctccgggagcaggtcttttacccatgttcccgcgcagacaatcgcttttttcgcctgatactcaccgtcagccgtttcaatagttacgccatcatcgtcatgacgaattgcggtgaccgggcagttgaacagttgcgcacagcccgcttccttcgccagttggatccaggttttaatcgccagttcgctgcgcaaaaaaccggaatcagtttcaaataagccgatgtagttgtccgggacgcgtatttccggccagcgggccataatcccttgcgcatcgagcttttcaacgttgagttgccattgttcggcgctgtgggcgacgttggcgagaaatgtggaatcagccgggccaaggttaatgacgccagagcgtacaaaaatgggatcttcttcgttgtggcgggagagttcatcccacagcgtttgcgcgcggaggaccagcgggacatacttttcgccttcaccataagcatggcgaattaatcgcgtatcgccgtggtggctgccgtgttgatgcggtggcatatgggcgtcggtcattagcacgtttaaaccggcgcgggttgcataatacccggcggcagcgcctacggaaccgctgccaataatgatgagatcgtatttcatttttttctctctgctctcatggtttaagcagagtaattaactgaatgcagatatacaacccagaaatggtaaaggcaccggtgaggtgccttttgggtggatggtcatgtcatgttaatgacgccgatactcgtttacctggaaatcaccggattcaattttggcgattcctgcttctaatatgctaataaattgtctggcaacatcagtggttaaccagagcgtctgaccaacttcagtcccttcctgctcggacttatttggggtctggtagtgcaaacgcaacatcagcgcatcatagctatcaacggtgctgatgtcccaccctacgagcggatgagtctgaatgacttcattatttttttccatcatggccccctaattcgtgttactagacaacgttattcgaggttcaatgcgtttttatctgaagcaacttcagtataccaataagtaagggtattcaccgaatttttaaagggggaaacagataaatttctgcttttaagatttatatgaacaataaaacagcatgtcattcatatttttttagcatattgtgcaattattttgaggaagtgtagaaattttgtactcaaaattcgtaagtaaaataaaaaagccggggcgacccggcaaaaaaaatcactgcatattattcgctgacaaaccagtcatcggcgctttcccacgtttcctggagaatttcactaatgcgctgtttatcttcttttgtcgcgccaataacgcttaaattattcgctgcggcataacgtacgcttacgtggccttcattatcaggaaacgcatactgaatacggcgggaaagttcgccagccagggcgtcaatagccccagctggcaatggagaagttttcgctatggtgacttcaattcgcataatagccccctgttgaatatactggttatttatacaggtaaaataacctaatgacaacaggaagctacgatttttattgtttaacggaccagcgtaccgtttccccggcgaggaatggcaccagcgtgtcatcagtcagtgcgatgctttcagcaacctgttgctcttcacgtaccagttcgatgaatgtgtcgttgaccggcaacccatagaactgcgggccgtttacagaacagaatgcttcaaagtgctgcaaagcattcatttcttcaaagacggtagcgtaactgcccagcgcggttggggcgttgaagcagcccgcgcagccgcaactgctctctttgcgatgacgtgcatgtggcgcagaatccgtaccgaggaatactcgattaaaaccgctggcgaccagttcacgcaatgcctgttggtgaatattacgtttgaggatgggtagacaatacaggtgcggacgcacgcctccaaccagcatatggttgcggttaaacatcagatgctgcggagtgatggtggcagccagccgttcatttccgtcacggacatagtcggcagcatctttggtggtgatgtgctcaaaaacgactttcagcgcagtcaggcgctggcgcagaggttccatcacgctttctataaagcgcgcttcacgatcaaaaatgtcgatatctgcatgtgtcacttcaccatgcaccagtagcggcataccgattttttccatgcgctcaagtaccggcatgattgcgtcaatactcgtcacgccgtggctggagttagtggttgcgtttgccgggtaaagttttgcagcggtgaacacgccttcgttaaatccgcgctccagctcattaggatccaggctatctgttaaataacaggtcatcaatggggtgaaatcgtgcccggcaggtacggcgtcaagaatacgctggcgatacgccacggcagcctcaacggtggtcacgggcggagccagattgggcattacgatagcccgtccataaatttcgctggtatatggcacgacagtttttaacatgtcgccatcgcggaggtgaaggtgccagtcgtctgggcggcggatctttaatacctgggatggtgcagtcattaatctctatgctccggctgaagggatgtttttgccggacacaaaggataagcggaaacgttttcctttgcacgaaaaataaagggcgcgaatgcgccctcgtgattaatcagtaaatggaatgacaatttcgcctggcttcacttcaatgcctttcgccagttttttcgccattgcttcgccctggctgccatcttcgcgcaggacgtaagcaggttgctggttaaagtaattgcgtaatgcctggttcaaatagggaagcaacgtttgcatcaccgtttgcattttttccggttgtaccgtcgcatcgaccacttccatctctttcaggaagatcgcacctttttctttatcaaacacgggcagcgctttcagcttcagtttcatggtcgctttctgactaccgaacagggagttcatgtccagattggcgtctccggttagggtaaccttattcggctcttcgcgaccaatttggctggtcaggtttgtcagaacaatatgggcgtcagccacgccgggtaaaccgatatctttactgaaattattatgtttcgcaaggctctggttaatttcttgttcggtgatggtgtattgggtgagttgattacagccaacgagcaggccactgacgatcaatgcagcggcaaataaaaacttgttcatggtagtcctcgacatgaaatctgcgtcaatatcctgacacaacgcagcatgtgtcaccagcgataaactcgccagcagaaaaaactgaaaacggcggcaacccgcgaatacaggctgccgcggcgggtcaggattaaatcgccatactacttaacaaattgatttgtgtctgtttcgccatattatcgcggtaatcagcaacgcggcttggccagttaattccggctaccagcgtcagattacgcagtagcgggaatagctgaatatcatcttcgctaagttcgccattcacggcgttcggtttgacgatcagtttgtccagcgcacgtaaatcatcgctgatattcttaatcagaccgtcagagtgggccagcaggtcggcaaaattacccgcgctggcctctttcttgtcgacgaaatatttgcgcgcggcgggagtagaaaactcatcaaatgcgcttttggcaaaacgcggcaacagcagtttgttggcgtagccattgaccttgcgcagccactcttcaatggcaggggaacgtttgccggtcagtaacggtttgccgtcgagtttatcgacatagtgaacgatgtccatgctttctggcatatagcggctgtcatctttttgcagaatgggaacctgtttttgaccgaccatccgggtgggtgtttctgcgtcgtcgttgagcagaacatgtaattcgacggggatatttttcaggccgaaaatcatgcgggctttgaggcagtaagggcagtgatcgtaaatgtatagcttcacgtgactcctccatttggctgtcagttcactttcagtatgaaggagtcaggggggagtatcaaatcaggcgtcgcgttcaagcaaacgacgcgcggcgcgtttctggctaaactgccaacccagcgcaaggaaagtgaagatgccaataatgcccagcatcatccacggaagctctggctggtgcgcgcttttgcccaggtcaaacagccagccgccaccgatataaccaatagcgccgccaatcgccagacccagacggctaaaccccatatagctgccgcgagctcttgcgtccgccaggctagcacttaaggtttcacgcgcaggctcggcaatgatgctcccgatataaaacagacaaatcagggtgaaaagttgttgcaggccgctgaccatgcccaccggcatcatgcttaaactcattatcaacagcccagccatcaaccggtgttccagacgaaaatgcttttcactccagcgggcgatagggtagagcaacgttaagctcagacacgcttcaatggcatacatccatttaacggcagagggcgcgcagccacgtcgttgaccataattggcagcatcagcatcacttgtacagccagcatgtagtaacccgccagcgtcagaacataggtgacaaaacgcttgtcacgcatcacgcgggtcatgccttcgcgaacgggcgtgcgtacggtggagagtttccatgctggtaacaaccacgcattgaacgccgcacatagcacaaatagaactgcccctgtggcgcagaccaggcgaaagtcgtattgcaacagccagctccccaacaatgcgccaatgaccgcaccggcactgtcctgcatcatcaacaggctgaaaaaacgaccacgctgctgtggacggattaatttcaccaccagcgcgctacgcggcggatcaaacaacgtgccaccgagtccgctgagcaggcaactaaaccacaatagccacggttcgtgggcgatacccattgtggcgaatccggcggcgcgcatcagcataccggtaacaatcatcggtttggcaccaaagcggtcggcaattgcaccgccgaaaatacccagaccttgctgaataaattggcgtagaccgagagcaataccgaccatgacggcggcccagcccatttgatcaacgaagcggatagagatcagcgggaagacaacaaagaaccccagcacgaccagcatattatcgatgagcaggaaatatttacccaggttcctcgcctggctcacgcgggacatttcccctcccgggaaataaaagatgagcactttctattctgcattgccgctaagacttttcccatcacttcggggacaatatttttttatcaaaacgtcgctttgatagagagtttttatcaaatatgtgaataatgcagaaaatggcattttggacttttcacagggtctggttgcgcaggtatagtaatacttacagcgtattaaagacgttacgggaaggagtaggtatagaatgtttggctatcgcagtaacgtgccaaaagtgcgcttaaccacagaccgactggtcgtgcgtctggtgcatgatcgtgatgcctggcgtcttgcggattattacgcagagaatcgccatttcctcaagccctgggagccagtgcgcgacgaaagccactgttatccaagtggctggcaggccaggctggggatgattaacgaatttcataaacaaggtagtgctttctactttggcttattcgacccggacgaaaaagagattattggcgttgccaatttttccaatgttgttcgtggctcttttcatgcctgctatctcggttatagcattgggcaaaaatggcagggcaaaggactcatgtttgaagccctgaccgcagccattcgttatatgcagcgcacccaacatattcatcgcattatggctaattatatgccgcacaataaacgcagcggtgatttactggcgcgactgggttttgaaaaagaaggctatgcgaaagactatctgttgattgatggacaatggcgcgatcacgtactgacggcattaactaccccagactggacgcccggccgctaaggagaatctcatgaaatatcaacttactgcccttgaagctcgcgtgattggttgcttgctggaaaagcaggtgaccacgccggagcaatacccgctcagtgtcaatggtgtagtcacggcctgtaatcagaaaacgaaccgtgaaccggtcatgaatctgagtgaatccgaagtgcaggaacagctggataatctggtcaaacgtcattatctacgcacagtgagcggttttggtaatcgggtcaccaaatatgagcaacgtttttgtaatagtgaatttggcgatctgaaactgagcgcagcggaagtggcgttaatcaccacgttgttattgcgtggtgcccagacgccaggtgaactgcgcagccgcgccgcgcgaatgtatgaattcagcgatatggcggaagtggagagcacgctggaacaactggcaaatcgcgaagatggtccttttgtggtgcgtctggcccgcgaaccgggtaaacgcgaaaaccgctacatgcatcttttcagtggtgaggttgaagatcagccggcggtgacggatatgagcaacgcggttgacggtgatttacaggcccgcgtcgaagccctggaaatcgaagtggcagaactgaaacagcgtcttgatagcttgctggcccatctgggagattaaagtgaaaaaattacgtatcggcgtagtgggattaggtggcattgcgcaaaaagcgtggttaccggtgctggcggcagcgtctgactggacgttacaaggagcctggagccctacgcgcgcgaaagccctgccaatttgtgaaagctggcgcattccttatgccgatagcttatccagccttgccgccagttgcgatgcggtttttgtgcattccagcaccgccagccactttgacgtggtcagtacgttactcaatgcgggggtacatgtctgtgtcgataaaccgctggcagaaaatctgcgcgatgctgaacggctggtggaactggcggcgcggaaaaaactgacgttgatggtcggttttaaccgtcgtttcgcaccactctacggtgagttaaaaacgcaactcgccaccgcagccagcctaagaatggataaacatcgtagcaatagcgtcgggccacacgatctttatttcacgttgctggatgattatctgcatgtggtggataccgcgctgtggttgagcggcggcaaagcctctctggatggcggtacgctactgactaacgacgctggcgaaatgctgtttgccgagcaccattttagcgctggtcctttgcagatcaccacctgtatgcatcgccgtgccggaagtcagcgtgaaaccgtgcaggccgtgactgacggtgcgctcatcgacattacggatatgcgcgaatggcgtgaggagcgcgggcagggcgtagtgcataaaccgattcctggttggcagagtacgcttgagcaacgtgggtttgtcggctgtgcgcggcacttcattgaatgtgtgcaaaaccagacagttccgcaaaccgccggcgaacaggccgtgctggcgcaacgtatcgttgacaagatctggcgcgatgcgatgagtgaataaaccctgtaacatctggcggtagcaattcaccataatccaggtagactattcgcctctttcagcgcctgccttgcaggcgttttgcccgtgggtctggattagaacaccgatgaatttattaaaaagcctggccgccgtcagcagcatgaccatgtttagccgtgtgcttggcttcgcacgagacgcaattgtcgccagaatctttggcgcagggatggcaaccgacgcctttttcgtcgcttttaaacttcctaacttgttacgccgtatctttgccgaaggggcattttcccaggcatttgtaccgattctggcggaatataaaagtaagcagggtgaagacgccacgcgggtctttgtctcttatgtttctggcctgctgacacttgcgctggcggttgtgacggtcgctggcatgctcgccgcaccgtgggtgatcatggtgaccgcgccaggcttcgctgacacagctgacaaatttgccctgaccagccagctactaaagattacctttccctatatcttgctgatctccctggcgagcctggtgggagcgattctgaatacgtggaaccgcttcagcattccggcgtttgctccaacactgcttaacatcagcatgattggtttcgcgctgtttgccgcaccgtactttaacccaccggtgctggcgctggcgtgggctgttacggtcggcggcgtcctgcagctggtgtatcagctaccgcacctgaagaagatcggcatgctggtcctgccgcgcattaacttccacgatgccggagcaatgcgcgtggtgaaacagatgggaccggcgatccttggcgtctctgtgagccagatctccttaatcatcaacaccatttttgccagctttcttgcttccggtagcgtgtcttggatgtattacgccgaccgcttaatggagtttccgtccggtgtgctgggcgtggcgcttggcaccattttgctgccgagcctgagcaaaagttttgccagtggcaatcatgatgaatacaaccgtttgatggactgggggttgcgtctttgtttcctgttggcgctgccgagtgcggttgcgttgggcattctttccggtccgttgaccgttagcctgttccagtacggtaaatttaccgcgtttgatgcgctgatgacccagcgggcgttaattgcctacagcgtgggtttgattggcctgattgtagtgaaagtgttggctcctggcttttattcccgccaggacattaaaacgccagtgaaaattgccatcgttacgctgattttaacgcaattgatgaacctggcgtttattggtccgttgaaacatgccgggctgagtctttctattggtctggcggcgtgtctgaatgctagcctgctttactggcagttgcgtaagcagaaaatctttaccccgcaacccggctggatggcgtttctgttgcgtctggtggtggcggtactggtgatgtctggcgtgcttttaggtatgttacatatcatgccggagtggagtttgggtaccatgccctggcgtttactgcgtttaatggcggtcgtgctggcggggattgccgcgtacttcgctgcactggcggtactgggcttcaaagttaaagaatttgcccgccggacggtgtaacaatgcattccggcctgcagtgttcgctttaaaacatatcatgaaactgggtatgttttgtctgcctgctctgggatcgctggggcgggcatttttttgcctattttgcattgttggttagcaaggatgccattcgatgaattttaatatgttgattcaaagatgaaataaaaaagccctggcagttaccagggcttgattactttgagctaattattactcaacaggttgcggacgcgcaggagcggcagaggcatgatgtgttgccgtatgaccacctgcggcacctttaccttcgaaggcaaaagtagggcgctgccagtcactgtgacgcggtgcctccggaacatattccggtgctggagcgcgcgtcattggcgcggtagcgtggttatgctcaacggtgacctcaggttcgaccgcagctaccgtttcaacttctgctgcgacttcagcgactactggcgcggcaggttgagcaacaacttcaggttcagcaactacaacctcagcagtttcgacaacttcttcaatatctgccgtctcttcctgcggttcaaccaccggttctgcttgttctgcaacttcctgggctacggcaacatcagactcggtaatcacctgcggctgttcagttaccgcggcagcgatcacttcaggatgcgtcgtttcaaccacttccggttgcggttcggcaacctgaacgggggcttctacgacaccggccacttcttcaacaactggcgcgctaacaaccggttcgatagcggcggcgacagggacctcagtcaccatcggctgcacatgtacttcttcctgttcgcgctgctcttcaacctgtacatcttgcggacgtacaattggatagcggatccagactttgccagaggccagttccggagacgcgcacgctacggtcaacggcattgggctctgggttggataacgctcgtcacgatagcgacgacgacgctgaccacttacgcgcaggtgacgagggctgcggcgagaacgacgcggcatgccaccgttgtcacggttatcagcattgttctcttcttgctgttctggtgcagtttgcgctacgactggcagcgggactttcaccagttctgtgcgtggagctggcgcttcctgaacaattggttcggcagcgacagtttcttcaaccaccggtgcgactaccgcttcttcggctacgctttgctcgtaacgcactttctgattgagctgacgctgtttacgacgcggctgaaccggacgtacacgttcttcctgttcggtttcctgaacagattgctcttcaacattcagcgccttcgcttcttgttgcgcctgacgtttatcatcattacggcggcggctacgttcacgacgcggcgcttgctgctcgtcggcggtacgcgctttttccgttacctcagcctgctgacggctctcacgcgtctcggcagtctgctgctgtgcctggcgacgattacgacggttttcttcgcgattatcgctgccttcagtacgttcactacgggtgtcgcggcgctcattacggtcacggcggttgttctgacgaggcttgcgacgatcctgttgacgttccggtttcgcttctgctttcggtgctggttgctcggtcggtttggtttcttcaccaccgctgaacagcgctttcagtgcgccgaagaagcggctcaacagcccaggttgtgcaggagctgctggtgttgccggtgcagctttcggtgctggagctacaacaggcgcggcaggttcagctggcgttggcgcaggcggcacatccggcatggcaaaggttgccagcgcaggttgttccggacgcttacgttcagcgaactcttcttcagacggcagcgccatcgcttcttcatgcagcttcggcagcatgtagcttaaggttggggtttcttcccctttacgcacgcgcagcacgtggtagtgcggggtttccatctgatcgtttggcacaattacacagcgcacaccgtcctgacgagtttcaatggcatttaccgcagaacgtttttcattcagcaggtaagaagcgattggcacaggaacaatggcgtgaacttcctgggtgttctctttcagcgcttcttcttcgatcagacgcagaatagagaggctcaggctttcgttgtcacgcacggtgccagtaccagaacaacgcggacaaacgtgatgactggattcacccagacttgggctcaggcgctgacgggacatttccagcaggccaaagcgagaaatatggctgatttgaatacgcgcacggtcctgacgcaccgcttcacgcagacggttttctaccgcacgctggtggcgtactggcgtcatgtcgatgaagtcgataacaatcaggccgccgaggtcacgcaggcgcagctgacgagcaatctcatcggcagcttcgaggttagtgttaaacgcggtttcttcgatatcgccgccgcgggtcgcgcgtgcggagttgatgtcgatggccgttaacgcttcggtgctgtcgataacaatggaaccaccagacggcagacgaacttcacgctggaaggcggactcgatctgactctcgatctggtagtggctgaacagcgggatctcgccggtgtacagtttgattttgctgctgaaatccgggcgacctaatgcagcgatatgctgacgtgccagttcgagcactttcgggttatcgataaggatttcgccgatgtcctgacgtaagtaatcgcggaatgcgcgaacgattacgttgctctcctgatgaatcaggaacggggccgggcggctttcagcggcttttttgatggcttcccagtgtttcagacggaagcttaaatcccattgcagcgcctcagcagatttgccgacgccagcggtgcgcacgataagccccatgccttccggcagttcaaggcttgccagtgcttcttttaattcggtacggtcgtcgccttcgatacggcgagaaatgccacccgcgcgcgggttgttcggcatcagaaccagatagctacccgccagactgataaaggtggttaatgccgcgcctttgttgccgcgctcttctttatcgatctgaacaatgacttcctgaccttcacgcaacacatctttaatgttgggacgaccatgagcactgtagttagcagggaaatattcgcgggcaatttcttttagtgggaggaaaccgtgacgttcagcgccgtaatcaacaaaagcagcttccagactcggttcaatgcgggtgattttacctttgtagatgtttgcctttttctgctcgtgccctggactttcgatatccaggtcatacagacgctgcccatctacaagggcaacgcgcaactcttcctgctgagttgcgttgattaacattcttttcatcgtaacttactcattattcttacattgacgactaagctgcgggcaaagtaacgcctttccgggtgtgaaccgatggcctcgtgtctagtcgcgtcgccaacctcacggttatcgtcagctcaaagaggcgcagagtgtgagttgcccgtttttcatgcggaaaaacagcgcaattatcaaagaaacagactgggtattactctccagaaatatttccatctaccggtaaggactgcaacccgcagcccgctaactgcctgaaagatcaatacgtcttacgccattgctgcgtggatgatcggtcgggcaaaatgggttattccgtaaaatttcttgttttaacaaggatggacacggaaacggcctcattattccactgcaagccttgttatagcaagatgacttttaccatttatcacccgcttactcacagttttttcacttcttgctggtgattggtttaataaccatcaataaagtgatcacgcagtgaagtaataaggtgcaaaagtaaatataagcatagaaaaatgagtggcgcgaatcctgttggctaattagaatcgccaaccatgaaaacagagactccatccgtaaaaattgttgctatcaccgctgacgaagcggggcaacgtatcgataactttttgcgtacccaattgaaaggcgtaccaaaaagtatgatttaccgtattttgcgtaaaggcgaagtgcgggtgaacaaaaaacgtattaagcctgaatataaactcgaagcgggtgatgaggtgcgtattccaccggttcgcgttgctgagcgggaagaagaggcggttagcccacatctgcaaaaggtggcggcgctggcggacgtcatcttatatgaagatgatcacatcctggtgctgaataaaccttccggtacggcggtacatggcggcagtggtttaagcttcggcgttattgaaggtttgcgggcgttgcgcccggaagcgcggttccttgaactggttcatcgtcttgaccgggacaccagtggtgttttgctggtagcgaaaaaacgcagcgcgttgcgttctctgcatgagcaattacgtgaaaaagggatgcaaaaagattacctggcgctggtgcgcggtcagtggcagagccatgtgaagagcgttcaagcaccgttactgaaaaatattctgcaaagcggcgaacgtatcgtgcgtgtgagtcaggaaggcaaaccgagcgaaacacgctttaaagtggaagaacgctatgcatttgccaccctggtgcgttgtagcccggtaacagggcgtactcaccagatccgtgtgcatacacaatatgcgggtcatccgattgcctttgacgatcgctacggtgaccgtgaatttgacaggcagctcactgaagcaggcacgggattaaatcgcctgttcctgcacgctgcagcgttgaagtttactcatccggggaccggtgaggtgatgcgtatcgaagctccgatggatgaaggtttgaagcgttgtttgcaaaagctgcgtaacgcgcgctaatacaagcatataaacctgataatgggcggttggcctgataaggcgtttacgccgcatcaggccgccagcaccgattgccggatgcgacgtaaccacatccggcgcaaaaaattatcccatcagcgggtttttcccttcccgacgtaacatctgacacagcgcgattagcggtaaaccaaccagcgtgttaggatcacgcccctctaaacgctcaaacagcgtaatgccaaatccttcactcttaaagctacccgcgcagtgcaggggatgctctttacgcacgtaattatcaatctccgcctcgctcaggtgacggaaatggacgtcaaaaggctccacttctgtttgcagatgcccattcgcgctattaaacaacgccagtccagtatagaaggtgacgatattgccgctggctttgcgtaattgcagacgggcattttcttccgttaacggtttaccggtgatttcgccatcaagaacacatacctggtcactaccaataattaaatgatccggataacgactcgccagagattgcgctttttcttgtgccagtcgaagcaccaactgtcgcggactttcgtcgctgcgtggggtttcgtcgacctctggtgctgcacattcaaaagagatttgcagtttttccagaagagcgcgacgccatgggctggtggaggctaaaataagtttaggcatatttttttccatcagatatagcgtattgatgatagccattttaaactatgcgcttcgttttgcaggttgatgtttgttatcagcactgaacgaaaataaagcagtaacccgcaatgtgtgcgaattattggcaaaaggcaaccacaggctgcctttttctttgactctatgacgttacaaagttaatatgcgcgccctatgcaaaaggtaaaattacccctgactctcgatccggttcgtacggctcaaaaacgccttgattaccagggtatctatacccctgatcaggttgagcgcgtcgccgaatccgtagtcagtgtggacagtgatgtggaatgctccatgagcttcgctatcgataaccaacgtctcgcagtgttaaacggcgatgcgaaggtgacggtaacgctcgagtgtcagcgttgcgggaagccgtttactcatcaggtctacacaacgtattgttttagtcctgtgcgtagtgacgaacaggctgaagcactgccggaagcgtatgaaccgattgaggttaacgaattcggtgaaatcgatctgcttgcaatggttgaagatgaaatcatcctcgccttgccggtagttccggtgcatgattctgaacactgtgaagtgtccgaagcggacatggtctttggtgaactgcctgaagaagcgcaaaagccaaacccatttgccgtattagccagcttaaagcgtaagtaattggtgctccccgttggatcggggataaaccgtaattgaggagtaaggtccatggccgtacaacagaataaaccaacccgttccaaacgtggcatgcgtcgttcccatgacgcgctgaccgcagtcaccagcctgtctgtagacaaaacttctggtgaaaaacacctgcgtcaccacatcactgccgacggttactaccgcggccgcaaggtcatcgctaagtaatcacgcatctgcgtgatgaagcttagtgaggattttccccaggcaactggggaaagaccaaaccgggcggcgacgataccttgacacgtctaaccctggcgttagatgtcatgggaggggattttggcccttccgtgacagtgcctgcagcattgcaggcactgaattctaatagccaactcactcttcttttagtcggcaattccgacgccatcacgccattacttgctaaagctgactttgaacaacgtagccgtctgcagattattcctgcgcagagtgttatcgccagtgatgcccggcctagccaagctatccgcgccagtcgtgggagtagtatgcgcgtggccctggagctggtgaaagaaggtcgagcgcaagcctgtgtcagtgccggtaataccggggcgctgatggggctggcaaaattattactcaagcccctggaggggattgagcgtccggcgctggtgacggtattaccacatcagcaaaagggcaaaacggtggtccttgacttaggggccaacgtcgattgtgacagcacaatgctggtgcaatttgccattatgggcagtgttctggctgaagaggtggtggaaattcccaatcctcgcgtggcgttgctcaatattggtgaagaagaagtaaagggtctcgacagtattcgggatgccagtgcggtgcttaaaacaatcccttctatcaattatatcggctatcttgaagccaatgagttgttaactggcaagacagatgtgctggtttgtgacggctttacaggaaatgtcacattaaagacgatggaaggtgttgtcaggatgttcctttctctgctgaaatctcagggtgaagggaaaaaacggagctggtggctactgttattaaagcgttggctacaaaagagcctgacgaggcgattcagtcacctcaaccccgaccagtataacggcgcctgtctgttaggattgcgcggcacggtgataaaaagtcatggtgcagccaatcagcgagcttttgcggtcgcgattgaacaggcagtgcaggcggtgcagcgacaagttcctcagcgaattgccgctcgcctggaatctgtatacccagctggttttgagctgctggacggtggcaaaagcggaactctgcggtaacaggacgctgccagcgaactcgcagtttgcaagtgacggtatataaccgaaaagtgactgagcgtacatgtatacgaagattattggtactggcagctatctgcccgaacaagtgcggacaaacgccgatttggaaaaaatggtggacacctctgacgagtggattgtcactcgtaccggtatccgcgaacgccacattgccgcgccaaacgaaaccgttagtaccatgggctttgaagcggcgacacgcgcaattgagatggcgggcattgagaaagaccagattggcctgatcgttgtggcaacgacttctgctacgcacgctttcccgagcgcagcttgtcagattcaaagcatgttgggcattaaaggttgcccggcatttgacgttgcagcagcctgcgcaggtttcacctatgcattaagcgtagccgatcaatacgtgaaatctggggcggtgaagtatgctctggtcgtcggttccgatgtactggcgcgcacctgcgatccaaccgatcgtgggactattattatttttggcgatggcgcgggcgctgcggtgctggctgcctctgaagagccgggaatcatttccacccatctgcatgccgacggtagttatggtgaattgctgacgctgccaaacgccgaccgcgtgaatccagagaatagtattcatctgacgatggcgggcaacgaagtcttcaaggttgcggtaacggaactggcgcacatcgttgatgagacgctggcggcgaataatcttgaccgttctcaactggactggctggttccgcatcaggctaacctgcgtattatcagtgcaacggcgaaaaaactcggtatgtctatggataatgtcgtggtgacgctggatcgccacggtaatacctctgcggcctctgtcccgtgcgcgctggatgaagctgtacgcgacgggcgcattaagccggggcagttggttctgcttgaagcctttggcggtggattcacctggggctccgcgctggttcgtttctaagataaggattaaaacatgacgcaatttgcatttgtgttccctggacagggttctcaaaccgttggaatgctggctgatatggcggcgagctatccaattgtcgaagaaacgtttgctgaagcttctgcggcgctgggctacgacctgtgggcgctgacccagcaggggccagctgaagaactgaataaaacctggcaaactcagcctgcgctgttgactgcatctgttgcgctgtatcgcgtatggcagcagcagggcggtaaagcaccggcaatgatggccggtcacagcctgggggaatactccgcgctggtttgcgctggtgtgattgatttcgctgatgcggtgcgtctggttgagatgcgcggcaagttcatgcaagaagccgtaccggaaggcacgggcgctatggcggcaatcatcggtctggatgatgcgtctattgcgaaagcgtgtgaagaagctgcagaaggtcaggtcgtttctccggtaaactttaactctccgggacaggtggttattgccggtcataaagaagcggttgagcgtgctggcgctgcctgtaaagcggcgggcgcaaaacgcgcgctgccgttaccagtgagcgtaccgtctcactgtgcgctgatgaaaccagcagccgacaaactggcagtagaattagcgaaaatcacctttaacgcaccaacagttcctgttgtgaataacgttgatgtgaaatgcgaaaccaatggtgatgccatccgtgacgcactggtacgtcagttgtataacccggttcagtggacgaagtctgttgagtacatggcagcgcaaggcgtagaacatctctatgaagtcggcccgggcaaagtgcttactggcctgacgaaacgcattgtcgacaccctgaccgccagcgcgctgaacgaacctagtgcgatggcagcggcgctcgagctttaaaagaggaaaatcatgaattttgaaggaaaaatcgcactggtaaccggtgcaagccgcggaattggccgcgcaattgctgaaacgctcgcagcccgtggcgcgaaagttattggcactgcgaccagtgaaaatggcgctcaggcgatcagtgattatttaggtgccaacggcaaaggtctgatgttgaatgtgaccgacccggcatctatcgaatctgttctggaaaaaattcgcgcagaatttggtgaagtggatatcctggtcaataatgccggtatcactcgtgataacctgttaatgcgaatgaaagatgaagagtggaacgatattatcgaaaccaaccttagttctgttttccgtctgagtaaagcggtaatgcgcgctatgatgaaaaagcgtcatggtcgtattatcactatcggttctgtggttggtaccatgggaaatggcggtcaggccaactacgctgcggcgaaagcgggcttgatcggcttcagtaaaagtctggcgcgcgaagttgcgagtcgcggtattactgtaaacgttgttgctccgggctttattgaaacggacatgacacgtgcgctgagcgatgaccagcgtgcgggtatcctggcgcaggttcctgcgggtcgcctcggcggcgcacaggaaatcgccaacgcggttgcattcctggcatccgacgaagcagcttacatcacgggtgaaactttgcatgtgaacggcgggatgtacatggtctgaccgcgatttgcacaaaatgctcatgttgcgcgcagtctgcgtggttatgagtaataattagtgcaaaatgatttgcgttattggggggtaaggcctcaaaataacgtaaaatcgtggtaagacctgccgggatttagttgcaaatttttcaacattttatacactacgaaaaccatcgcgaaagcgagttttgataggaaatttaagagtatgagcactatcgaagaacgcgttaagaaaattatcggcgaacagctgggcgttaagcaggaagaagttaccaacaatgcttctttcgttgaagacctgggcgcggattctcttgacaccgttgagctggtaatggctctggaagaagagtttgatactgagattccggacgaagaagctgagaaaatcaccaccgttcaggctgccattgattacatcaacggccaccaggcgtaagtgaacatctccaggcggtcgttcgaccgcctgagttttatctttttgtcccactagaatcattttttccctccctggaggacaaacgtgtctaagcgtcgtgtagttgtgaccggactgggcatgttgtctcctgtcggcaataccgtagagtctacctggaaagctctgcttgccggtcagagtggcatcagcctaatcgaccatttcgatactagcgcctatgcaacgaaatttgctggcttagtaaaggattttaactgtgaggacattatcagccgcaaagaacagcgcaagatggatgccttcattcaatatggaattgtcgctggcgttcaggccatgcaggattctggccttgaaataacggaagagaacgcaacccgcattggtgccgcaattggctccgggattggcggcctcggactgatcgaagaaaaccacacatctctgatgaacggtggtccacgtaagatcagtccattcttcgttccgagtacgattgtgaacatggtggcaggtcatctgactatcatgtatggcctgcgtggcccgagcatctctatcgcgactgcctgtacttccggcgtgcacaacattggccatgctgcgcgtattatcgcgtatggcgatgctgacgtgatggttgcaggtggcgcagagaaagccagtacgccgctgggcgttggtggttttggcgcggcacgtgcattatctacccgcaatgataacccgcaagcggcgagccgcccgtgggataaagagcgtgatggtttcgtactgggcgatggtgccggtatgctggtacttgaagagtacgaacacgcgaaaaaacgcggtgcgaaaatttacgctgaactcgtcggctttggtatgagcagcgatgcttatcatatgacgagtccgccagaaaatggcgcaggcgcagctctggcgatggcaaatgctctgcgtgatgcaggcattgaagcgagtcagattggctacgttaacgcgcacggtacttctacgccggctggcgataaagctgaagcgcaggcggtgaaaaccatcttcggtgaagctgcaagccgtgtgttggtaagctccacgaaatctatgaccggtcacctgttaggtgcggcgggtgcagtagaatctatctactccatcctggcgctgcgcgatcaggctgttccgccaaccatcaacctggataacccggatgaaggttgcgatctggatttcgtaccgcacgaagcgcgtcaggttagcggaatggaatacactctgtgtaactccttcggcttcggtggcactaatggttctttgatctttaaaaagatctaagttgtcattttccacccttataaaaggtccgcttgcgggccttttttcttagcttttattccgacttgttccgtagtgaacatgctgccacactaacaattctctgataaggagccggtatgttcttaattaacggtcataagcaggaaagcctggcagtaagcgatcgggcaacgcagtttggtgatggttgttttaccaccgccagagttatcgacggtaaagtcagtttgttaagcgcgcatatccagcgactacaggatgcttgtcagcggttgatgatttcctgtgacttctggcctcagcttgaacaagagatgaaaacgctggcagcagaacagcaaaatggtgtgctgaaagtcgtgatcagtcgcggtagtggcgggcgagggtacagcacattgaacagcggaccggcaacgcggattctctccgttacggcttatcctgcacattacgaccgtttgcgtaacgaggggattacgttggcgctaagcccggtgcggctggggcgcaatcctcatcttgcaggtattaaacatctcaatcgtcttgagcaagtattgattcgctctcatcttgagcagacaaacgctgatgaggcgctggtccttgacagcgaagggtgggttacggaatgctgtgcggctaatttgttctggcggaagggcaacgtagtttatacgccgcgactggatcaggcaggtgttaacggcattatgcgacaattctgtatccgtttgctggcacaatcctcttatcagcttgtcgaagtgcaagcctctctggaagagagcttgcaggcagatgagatggttatttgtaatgcgttaatgccagtgatgcccgtatgtgcctgtggcgatgtctcctttagcagtgcaacgttatatgaatatttagccccactttgtgagcgcccgaattaatcatgaaaaaagtgttattgataatcttgttattgctggtggtactgggtatcgccgctggtgtgggcgtctggaaggttcgccatcttgccgacagcaaattgcttatcaaagaagagacgatatttaccctgaagccagggaccggacgtctggcgctcggtgaacagctttatgccgataagatcatcaatcgtccacgggtttttcaatggctgctgcgtatcgaaccggatctttctcactttaaagccgggacttaccgctttacaccgcagatgaccgtgcgcgagatgctgaaattgctggaaagcggtaaagaagcacagttccctctgcgactggtagaagggatgcgtctgagcgattacctcaagcaattgcgtgaggccccgtatatcaagcatacgctgagcgatgataagtacgccaccgtagcgcaggcacttgaactggaaaacccggagtggattgaaggttggttctggccagacacctggatgtataccgccaataccaccgatgtcgcgttactcaagcgagcgcacaagaaaatggtgaaagcggtcgatagcgcctgggaagggcgtgcggacggtctgccttataaagataaaaaccagttggtgacgatggcaagtattatcgaaaaagaaaccgccgttgccagtgaacgcgataaggttgccagtgtatttatcaaccgtttacgcattggtatgcgcctgcagaccgacccgaccgtgatttacgggatgggagagcgttataatggcaaactttctcgtgcagacctggaaacgccgacagcgtataacacctataccattaccggtctgccgccaggtgcgatagcgacgccgggggcggatagcctgaaggctgctgcgcatccggcaaaaacgccgtatctctattttgtggccgatggtaaaggtggtcacacgtttaataccaatcttgccagtcataacaagtctgtgcaggattatctgaaagtgcttaaggaaaaaaatgcgcagtaagtatatcgtcattgaggggctggaaggcgcaggcaaaactaccgcgcgtaatgtggtggttgagacgctcgagcaactgggtatccgcgacatggttttcactcgggaacctggcggtacgcaacttgccgaaaagttaagaagcctggtgctggatatcaaaagcgtaggcgatgaagtcattaccgataaagccgaagttctgatgttttatgccgcgcgcgttcaactggtagaaacggtcatcaaaccagctctggctaacggcacctgggtgattggcgatcgccacgatctctccactcaggcgtatcagggcggcggacgtggtattgaccaacatatgctggcaacactgcgtgatgctgttctcggggattttcgccccgacttaacgctctatctcgatgttaccccggaagttggcttaaaacgcgcgcgtgcgcgcggcgagctggatcgtattgagcaagaatctttcgatttctttaatcgcacccgcgcccgctatctggaactggcagcacaagataaaagcattcataccattgatgccacccagccgctggaggccgtgatggatgcaatccgcactaccgtgacccactgggtgaaggagttggacgcatgagatggtatccatggttacgacctgatttcgaaaaactggtagccagctatcaggccggaagaggtcaccatgcgctactcattcaggcgttaccgggcatgggcgatgatgctttaatctacgccctgagccgttatttactctgccaacaaccgcagggccacaaaagttgcggtcactgtcgtggatgtcagttgatgcaggctggcacgcatcccgattactacaccctggctcccgaaaaaggaaaaaatacgctgggcgttgatgcggtacgtgaggtcaccgaaaagctgaatgagcacgcacgcttaggtggtgcgaaagtcgtttgggtaaccgatgctgccttactaaccgacgccgcggctaacgcattgctgaaaacgcttgaagagccaccagcagaaacttggtttttcctggctacccgcgagcctgaacgtttactggcaacattacgtagtcgttgtcggttacattaccttgcgccgccgccggaacagtacgccgtgacctggcttagtcgcgaagtgacaatgagtcaggatgcattacttgccgcattgcgcttaagcgccggtagccctggcgcggcactggcgttgtttcagggagataactggcaggctcgtgaaacattgtgtcaggcgttggcatatagcgtgccaagcggcgactggtatagcctgctagcggcccttaatcatgaacaagctccggcgcgtttacactggctggcaacgttgctgatggatgcgctaaaacgccatcatggtgctgcgcaggtgaccaatgttgatgtgccgggcctggtcgccgaactggcaaaccatctttctcccagccgcctgcaggctatactgggggatgtttgccacattcgtgaacagttaatgtctgttacaggcatcaaccgcgagcttctcatcaccgatcttttactgcgtattgagcattacctgcaaccgggcgttgtgctaccggttcctcatctttaagagagacatcatgtttttagtcgacagtcactgccatctcgatggtctggattatgaatctttgcataaggacgtggatgacgttctggcgaaagccgccgcacgcgatgtgaaattttgtctggcagtcgccacaacattaccgggttatttacatatgcgggatctggtaggcgaacgtgacaacgtcgtattttcttgtggcgtgcatccactcaaccagaatgatccctacgatgtagaagatttacgccgtctggcggcagaagagggtgttgtagcgctgggtgaaaccgggctggattattattacacgccggaaactaaagtacgtcagcaagagtccttcatccatcatatccagattggtcgtgaactgaacaagccggttatcgtccatacccgtgacgcccgtgccgatacgctggcaattctgcgcgaagaaaaagtgacggattgcggtggcgtactacactgttttacagaggacagagaaacggcgggtaaattactggatctcggattttacatctccttttccggcattgtgaccttccgtaatgcggagcaactgcgcgatgctgcgcgttatgtccccctggatcggttactggtggaaactgacagtccttaccttgcgccggtaccgcatcgaggaaaagagaatcaacctgcgatggttcgtgacgttgcagaatacatggctgtgttgaaaggtgttgccgttgaagaactggcgcaggtaaccaccgataacttcgcccgtctgtttcacatcgacgcttcccgccttcaatccatccgttgaatgagtttttttaaagctcgtaattaatggctaaaacgagtaaagttcaccgccgaaaattgggcggtgaataaccacgtttgaaatattgtgacatatgttttgtcaaaatgtgcaacttctccaatgatctgaagttgaaacgtgatagccgtcaaacaaattggcactgaattattttactctgtgtaataaataaagggcgcttagatgccctgtacacggcgaggctctccccccttgccacgcgtgagaacgtaaaaaaagcacccatactcaggagcactctcaattatgtttaagaatgcatttgctaacctgcaaaaggtcggtaaaagcctgatgctgccggtatccgtactgcctatcgcaggtattctgctgggcgtcggttccgcgaatttcagctggctgcccgccgttgtaagccatgttatggcagaagcaggcggttccgtctttgcaaacatgccactgatttttgcgatcggtgtcgccctcggctttaccaataacgatggcgtatccgcgctggccgcagttgttgcctatggcatcatggttaaaaccatggccgtggttgcgccactggtactgcatttacctgctgaagaaatcgcctctaaacacctggcggatactggcgtactcggagggattatctccggtgcgatcgcagcgtacatgtttaaccgtttctaccgtattaagctgcctgagtatcttggcttctttgccggtaaacgctttgtgccgatcatttctggcctggctgccatctttactggcgttgtgctgtccttcatttggccgccgattggttctgcaatccagaccttctctcagtgggctgcttaccagaacccggtagttgcgtttggcatttacggtttcatcgaacgttgcctggtaccgtttggtctgcaccacatctggaacgtacctttccagatgcagattggtgaatacaccaacgcagcaggtcaggttttccacggcgacattccgcgttatatggcgggtgacccgactgcgggtaaactgtctggtggcttcctgttcaaaatgtacggtctgccagctgccgcaattgctatctggcactctgctaaaccagaaaaccgcgcgaaagtgggcggtattatgatctccgcggcgctgaccagcttcctgaccggtatcaccgagccgatcgagttctccttcatgttcgttgcgccgatcctgtacatcatccacgcgattctggcaggcctggcattcccaatctgtattcttctggggatgcgtgacggtacgagcttcagccacggtctgatcgacttcatcgttctgtctggtaacagcagcaaactgtggctgttcccgatcgtcggtatcggttatgcgattgtttactacaccatcttccgcgtgctgattaaagcactggatctgaaaacgccgggtcgtgaagacgcgactgaagatgcaaaagcgacaggtaccagcgaaatggcaccggctctggttgctgcatttggtggtaaagaaaacattactaacctcgacgcatgtattacccgtctgcgcgtcagcgttgctgatgtgtctaaagtggatcaggccggcctgaagaaactgggcgcagcgggcgtagtggttgctggttctggtgttcaggcgattttcggtactaaatccgataacctgaaaaccgagatggatgagtacatccgtaaccactaatccgtaagacgttggggagactaaggcagccagatggctgccttttttacaggtgttattcagaattgatacgtgccggtaatgctgaaattacgcggtgtgccgtagacgatagaaccttccacgttggtatcgtaggttttgtcgaacaggttattgacgttcccctgtaagctgaagtttttcgtcacctggtagcgggtgaagagatccaccagcgcgtagctaccttgctcggcgcggaaggtgccatacggcgtcacggtgtcggtatacacgcgattttgccagttaacaccaccgccgaccgtcaactctggcatgacaggcaaccgatagctggtgaacattttaaccgtggtgcgtggcagattaggattaacggcgtttccttcgttatcctctgcaatatagcgcgttgcgccaaatgtcagctgccagttgtcggtaattgcgccgttgagttcaaattccacccctttactgactgtcccatccaccgctttataggcggtttcgccgttgctgccggggataggtgtaccggtggactgagcgacattatcctgctcaatacggaagatggctaacgtggtggtcagacggctattcatccagtcgcttttcagacccagctcgtagttgttaccggtgattggagccagatatttgccactactgtcacgatcattttgcggctggaaaatagaggtatagctggcgtaggtgctccagttgtcattgatgtcaaacaccagaccagcgtaaggcgtggtgtggtttttctccatgctgtaagtcagcgtatcaacccgccagttggtataacgtgcgccgaggatcagatgcagcggatcggcaagggtgacacgagtggcagcatataagcttttcatatgtgtggtatcgtcctgcgccaggctctgtggactccagtcggtttgtgggaaattgccattaaagttgtagaaactgccaatttcatccgggaagatgttggcccaactactgaagtaacgattgttttgtttgctgtaactgccaccaaacattagattgtgctgacgaccaaacaattcataactaccgtcagcgaacaaatccagcgcatcaactttacgtttgccactgttccaaccggtgccgccgacataatcaaagccaggtccataattactgtatggcccaaccagcataccatccgctttgtttacataggcatcgacatacatcattttgctgtcaaattcgacttcagagtgggtggcattcagtgtcgcttgccaggtatcagcaaactgctgcttcagggtcataaagaccttgttgatctctttatcgttgtacgcccagtcaggtgcggtactgcgtgcgcgatcgtaactgttgctgctgccatcagtattccagcgcggtaaaccgccccaggtagggctattaacatcaatgcgctgatattcgtaaccggcactaagcgtcgtaagatcgcctaaatcagcatcgacaatgccgctgaagaaggtcttttcactgttgtagcggtccagccaactgtcgttattctggtagccgccgacaattcgcgcgcggattttaccgtcttcggtgagtgggctttgtaaatccgccacataccgttctttgttccagctaccgtattccgcgctgacatcgcctttaaattcacgactggtcgcgtgttttcgaaccatattaattgccgcagatggattacccgtcccggtcatgagtcctgtcgcgccacgcactacttctacgcgttcaaagagtgccatatcagaaagtgcgtcgcccagattccagcggctttcaaaataggtggggataccatcaaccatatagttatcgatctggaatccgcgggaataataaagagcacgatcggaatccgcctgacttttgctgatccccagcgtgttttccatcacttcgcccagcgtttgtaactgctgatcttccatccgctgctggctaacaatagtgacgctctgaggaatatcacgttgagtcatctgcattttggtacccgcagaggtagacgttacgctgtaatcattttcgccatcatctggagctgtggcactaccctcaacaatcaccgtttcttcagtggctggtgcagcaaaagcggcagaaggtaatagtgccagtgctatgcaaccggcaagtagactcggtttggtgatggcttgatattgattatccctgttaaattgtgtactaagcatttgaaatctcttggtttatgttgtcgtcaggctcatgccggaggagggtgatgagcgattatatttagtgtgcgaataattttgtttgtaaatgcaaatgagaaatatacgcattcatatttgtcatgtaaaccaaacagagaatgtcttttcagcgcattcgcaggcagaaatgggaataatggcgatatatacggcagcaaaacgattttttgcttaagaaatcgtgagttaaggttgaaagagcaggtttaactcgaccatactctatactcgcagtgtggcgcggcgtagcatggcgcaacgcatggctatttgaaaaaggaaaatgtcgtggcagaagaaactatattcagcaaaattattcgtcgtgagatcccctccgatatcgtctaccaggatgatctggtaacggcgtttcgcgatattagcccgcaagcgccaacgcatattctgatcattccgaatatcctcattccgactgtgaacgacgtcagtgctgagcatgagcaggcgctgggacgcatgatcaccgtagcggcaaaaattgctgagcaagaaggtattgccgaagatggctatcgtctgatcatgaataccaaccgccatggcggacaagaggtttaccacatccatatgcacttgttgggtggccgtccgctgggaccaatgctggcgcataaaggtctgtaacgatgagaaaaggatgctttgggctggtgtctctggtgttgttactgctggtgggctgtcgtagtcatccggaaattccggtgaatgatgagcaaagcctggtgatggagagttctttattggctgcgggcatcagtgcagaaaagcccttccttagcacgtctgatattcaacctagtgcatccagtacgctttataacgaaaggcaagaacccgttaccgttcattatcgtttttactggtatgacgccagagggctggagatgcatcctctggaaaggccacgcagcgttaccattcccgcacatagcgcggtaacgctgtacggcagcgccaattttctgggggcgcacaaagtcagactttatctatatttgtaaggggtgaatcttgatgacaaaaatgagtcgctacgccttgattaccgcgctggcgatgtttctcgccgggtgtgtggggcaacgtgaacctgcaccggtagaagaagtgaaaccagcgccggaacaaccagccgagccacaacagcctgtccccacagtgcccagcgtgccgacgatcccgcagcagccaggcccaattgagcacgaagatcaaactgcaccgcctgcgccgcatattcgccattatgactggaatggcacaatgcagccgatggtcagtaagatgcttggggctgacggggtgactgcgggtagcgtcctgctggttgatagcgttaacaaccgtactaacggtagcctgaatgccgcagaagcgaccgaaacgctgcgaaatgcgctggctaataacgggaaatttaccctggtttccgcccagcaactgagcatggcgaagcaacagttaggtttgagcccgcaggacagtttaggcacccgtagtaaagccataggcattgcccgcaatgtcggcgctcattacgtgctgtactccagcgcctctggcaacgttaacgctccgaccctacaaatgcagctgatgctggtgcagacgggcgaaattatctggagtggtaaaggtgccgttagccagcaataagtaaaattatctggtcaggtaaaggtgccgtttcgcagcaataatcccatcacgcgcgacgaattgctgagccgctttttcccgcagtatcatcccgtcacgacgtttaatagtgggcttagtggcgggagttttctcattgaacatcagggccagcgttttgttgtgcgtcagccgcacgatcctgatgcgccgcagtccgcgttcttgcgccagtatcgggctttaagtcaactacccgcatgcattgcaccgaagccgcatttatatctccgtgactggatggtagtcgactatctgcccggcgcggtaaaaacgtatttgccggataccaacgaactggcaggcttgctgtattatctacatcaacaaccacgttttggctggcgaataacgctgttgccgttactggaactgtactggcagcaaagcgatccggcgcggcggacagtgggttggctgcgaatgttaaaacgtctgcgcaaagcgcgggaaccacggcctttacgcttaagtccattgcatatggatgtccacgccggaaatttagtgcatagcgcgagtgggttaaaactcatcgactgggagtatgccggagatggtgatatcgcgctggaactggcggcggtgtgggtggaaaatactgaacagcaccggcaattggtcaatgactatgccactcgcgcgaagatttatccggcgcaattatggcgtcaggtcaggcgatggtttccctggctgctgatgctcaaagcagggtggtttgagtaccgctggcgacaaaccggcgatcaacaatttatcaggctggccgatgacacctggcggcagctattaataaaacaataaggagagcagtgtgggtccagtaatgttggatgtcgaaggttacgaactggacgcggaagagcgtgaaatactggcgcatccgctggtgggagggctgattctctttacgcgtaactatcatgatcctgcccagttacgtgaactggtgcgccagatccgcgcagctagccgcaatcgtctggtggtggcggttgatcaggaaggtggacgcgtgcagcgttttcgtgaaggttttacccgcttgccagcggcgcaaagtttcgctgcgctgagtggaatggaagagggtggcaaactggcgcaggaggcaggttggttgatggccagcgaaatgatcgctatggatattgatatcagctttgcgcctgtgctggatgtcgggcatatcagcgcggcgattggcgagcgttcttatcatgccgatccacaaaaagccctggcaattgccagccggtttattgatggtatgcatgaagccggaatgaaaacgaccgggaaacacttcccaggacacggtgcagtaacggcagacagtcacaaagaaacaccgtgcgatccacgtccacaagcggagattcgcgctaaagatatgagcgtcttcagttccttaatccgcgaaaataaactcgacgccattatgcctgcgcatgtgatctacagtgatgttgatccgcgtccggcgagcggttctccctactggctgaaaaccgttttgcgtcaggaactgggttttgacggcgtgattttctctgacgatttaagcatggaaggtgccgcgattatgggcagttatgccgaacgcgggcaggctagtctggatgcgggttgcgatatgatcctggtctgcaataatcgtaaaggggccgtcagcgtgttagataatctgagtccgatcaaggcagaacgtgttacacgtttgtatcataaaggtagttttagccgacaggaactgatggacagcgctcgctggaaagcgatcagcacccgtctgaatcagttacatgaacgctggcaggaagagaaagcaggtcactaaccctggcttatgtgaggaagcgatgattatctatttacacggttttgactctaacagtccgggtaaccacgagaaagtcttacaattgcagtttattgacccggatgtacgcttgataagctacagtacgcggcatccgaaacatgatatgcagcatctgcttaaagaagtggacaaaatgttgcaactgaacgttgacgagcgtccgctaatttgcggcgttggcttgggcggatactgggcggaacggattggttttctttgcgacatccgccaggtgatcttcaaccctaatttgttcccttatgagaacatggaaggcaagattgatcgcccggaagagtatgccgatattgccactaagtgtgtgaccaacttccgtgagaagaatcgcgatcgttgcctggtgattttgagccgtaatgatgaagcgcttaacagccagcggacatctgaagagttgcatcattattacgagattgtctgggacgaagagcagacgcacaaattcaagaatatctccccgcatttacagcgcattaaagcgttcaaaaccctcgggtaaatgccctcgtcgcatcaggtaaccttgccggtacctgatgcgctccgaattctgtgggtcggataaggcgtccacgccgcatccgacagtcgagcatcaatgcctgatgcgcttcttatcaggcctaccgaacgccctgcatacacccctcactctatatcactctcacaaattcgctcaaataataaacaataaactctgttttttgatctcacccggtaaagtcgcctatcttttcagcaacaaaacttgattaacatcaattttggtatgaccaatgcaccattcatgttattctcaatagcgaagaacattttcattgctgtaacctgttgttaattaagagctatgttaataaccattaattaacaattggttaataaatttaagggggtcacgttgactacgccattgaaaaagattgtgattgtcggcggcggtgctggtgggctggaaatggcaacacagctggggcataagctgggacgcaagaaaaaagccaaaattacgctggtcgatcgtaaccacagccacctgtggaaaccgctgctgcacgaagtggcgactggcagccttgatgaaggcgtcgatgcgttgagctatctggcccatgcgcgcaatcatggtttccagttccagctgggttccgtcattgatattgatcgtgaagcgaaaacaatcactattgcagaactgcgcgacgagaaaggtgaactgctggttccggaacgtaaaatcgcctatgacaccctggtaatggcgctgggtagcacctctaacgatttcaatacgccaggtgtcaaagagaactgcattttcctcgataacccgcaccaggcgcgtcgcttccaccaggagatgctgaatttgttcctgaaatactccgccaacctgggcgcgaatggcaaagtgaacattgcgattgtcggcggcggcgcgacgggtgtagaactctccgctgaattgcacaacgcggtcaagcaactgcacagctacggttacaaaggcctgaccaacgaagccctgaacgtaacgctggtagaagcgggagaacgtattttgcctgcgttaccgccacgtatctctgctgcggcccacaacgagctaacgaaacttggcgttcgcgtgctgacgcaaaccatggtcaccagtgctgatgaaggcggcctgcacactaaagatggcgaatatattgaggctgatctgatggtatgggcagccgggatcaaagcgccagacttcctgaaagatatcggtggtcttgaaactaaccgtatcaaccagctggtggtggaaccgacgctgcaaaccacccgcgatccagacatttacgctattggcgactgcgcgagttgcccgcgtccggaagggggctttgttccgccgcgtgctcaggctgcacaccagatggcgacttgcgcaatgaacaacattctggcgcagatgaacggtaagccgctgaaaaattatcagtataaagatcatggtagcctggtaagcctgagcaacttctccaccgtcggtagcctgatgggtaacctgacgcgcggcagtatgatgattgaaggacgaattgcgcgctttgtatatatcagcctataccgaatgcatcagattgcgctgcatggttactttaaaaccggattaatgatgctggtggggagtattaaccgcgttatccgtccgcgtttgaagttgcattaatcgacgtacactggcggatgtggcataaacgcctcatccgcccttgaggaacagcgcgatcggcagccgcgttgtatcaggcatcctttcagactcctccgaatccttaagtatttccagccattcccgcgcttttcatcttctgtctgatagctgcttttctccttcgcttgcatgattggcataactgcaaagaaggaggtgttcccgtgaataaaagtatgttggcgggtatcgggattggtgtcgcagctgcgctgggcgtagcggcagtggccagtctgaacgtgtttgaacggggcccgcaatacgctcaggttgtttctgcaaccccaatcaaggaaacggttaaaacaccgcgtcaggagtgtcgcaacgtcacagtgacccatcgtcgaccggtgcaggatgaaaatcgcattaccgggagcgtgctcggcgctgttgctggcggcgtgatagggcatcagtttggtggtggtcgcggtaaagatgtcgccactgttgtgggggcgctgggtggtggatatgccggtaaccagatccagggctctctccaggaaagcgatacttacacgactacgcaacagcgttgtaaaacggtgtatgacaagagtgaaaaaatgctcggttatgatgtgacctataagattggcgatcagcagggcaaaatccgcatggaccgcgatccgggtacgcagatcccgctagatagcaacgggcaactgattttgaataacaaagtataacaaggctgtactctgcaatttggcccctcattcgctcaggctgaggggctttttttgcgacttatttcaccagttcgggccataaacgcaaagtcgttccggcaatctgcatcagtttttccaggcttgcaccttcgcgtgcgctgatgctcatcccctgaataatacaattaaggaattctgccagatgtgtcacgtcacagtggggcgggatttccccgcgcgcttgtcgttgacataaaaactgctgcaaagtgcgctcttgcatcgcatggcgacttttcaacgtattggcgatatctccactatctggggagagggtggtgcagttgttgatcatgaagcagcctgccggggtgtctttgctggtaaagcagttggcgatggcagcaaaatagtcagccagcgcagactccacgcttttctcttcacaaaacagctgtgcttcatgcttagcggcaaaacgatcgatatagcggtcgagaacggcacgaaataacccctctttgttggtaaattccgcgtatagcgtgggcgctttggctccggtcgcttcgacgaggtccgcaagagaagtcgcttcataaccgtgttgccagaacaatttcatggccttatcaagcgcggcatccctgtcgaacacttttgggcggccacggcttttttttacacattgtgtactgtcagttgccatgatgccgttgtacctggtgactgtgaatgaaaggttattataaaaataatcacctccgttcaccagtccagatcccataaaaataattgctttctatttaactgaaatttaaagatttttaaattaattaatgattgttataaaaaatatcttgtatgtgatccagatcacatctatcatttagttatcgatcgttaagtaattgcttgcgacgtcattcatctgcataaggccactattatgaaaaacgtaaaaaccctcatcgctgcggcgattttaagctccatgagttttgccagctttgcggctgtcgaagttcagagtacgccagaaggccaacaaaaagtcggtacaatcagtgctaacgcggggacaaatctgggaagcctggaagagcagctggcgcaaaaagcggatgagatgggcgcaaaatctttccgtattacttctgtaaccggtccgaataccctccatggaacagcagtaatttataaataagcattaaccctcattaatgcctgctactgctgattttttccccgcgacatgccgtgtcgcggggatttttttatccgggctttacagcgtttgtgggctcacttgatgacggcggacatccaccggcatcccggaacggacatccatcacatgttgcatcacttcagcgtcagtttgtgctgcatctttaaaactttgcattgcgctattcagcgtaattggcagcagctgcggatcgtcatcaatcttctcactcagcggctgatgtacttcaaccagacgcgcaccgtttggttcggcagagacttttatcggagtgttgatgatattcactttggtgcctggggtgacctggctaaagagtgttttgatatcgtcatcccgcagacgaatacagccagaacttacccgcatgccaatgccgaaatcggcgttcgtaccatgaagcaaataaacgccgccataggccgccagacgaatcgcatgatggcccattgggttatccagtccagccggcactaccgcaggcaactcaattccctgtgctttataacgggcgcggatgtttgccgttggcgtccaggttgggtttgcacgtttgtcactaacggtggtcaccattgtcggtgtcagcgtgtcaccacctaactgaccaatacctattggatacacggttacgctatttttacccggcgggtagtaatagagacgcagctccgcaatgttgatcacaatgccttcgcgcggcgcatctggaagtagggtttgcaacgggatcgttaacacgctgcccgcgcgcggtacgtaaggatcaacgccggggttagcctgtaacagagcgagaaagccgacgttgtattttttggcgatggcttccagagaaccaccgtcattttccaccacatgaaatttgttttcgccaaccagacgactgcccgctggcggcagcggccaggtgttggcttttgccggtagcgccagcgccacggcagcggcgaacgtaaaaaacgttagccagcgagaaaaacgcgttttgatcatcaccaaaaatccataataaatataaggttattgtaataaacagataagcctgaattatggatggtgacagtgtcggatagtgcagggaagtgcaaagaatttgtaaatgttgcagatgggggcgcagaaacgcccccgatttaccattaagcgatcgcgttctcttccagttcacgcataaactggcgtacccattcgatacgcgttttccgctcactcaaatcctgaataaatttcaggcgcgtcggaccatcaaggcggtaatgctgcggctgtttttgcagcaaaccaatcaaccaggccggattaacgtgattcttctcggcaaattcgatcaccccgcctttctcattaccttccagcttcctgatccccagtttctgcgcttgctggcgcagacgggcaatatccagcagggtacgcgccggatctggcagcaggccgaagcgatcgataagctcgactttgatctcttccagttcgttttccgttttggcgctggcaatacgtttgtagaagctcagacgcgtgttcacgtcagggatgaaatcatctggcaataggctcggcatccgcagctcgacttctgtttgctggctggtgagatcttccaggctcggctcgcgtccggctttcagtgcatcgacggcgttttccagcaactccatatacaggctgaaaccgatggtttccatactgccgctttgttcttcgccaagcagttcacccgcgccgcgaatctccagatcgtgcgttgccagcgcaaaacctgccccgagatcttccaggctggcaattgcttcaagacgtttttgtgcatcggtagtcatcgcttttggatgcggtgtcagcaaccatgcatatgcctgatgatggctacgtccgacgcgaccgcgtaactggtgcagctgcgccagaccgaagtgatccgcgcgttcaatgataatagtgttggctgtcgggatgtcgatcccggtttcgataatggttgtacaaaccagcacgttgaaacgttgatgatggaaatcattcatcacccgttccagttcgcgctcgcgcatctgcccgtgaccgatggcgatccgcgcttctggcaccagttctgccagccgttcggcggctttctgaatgttttccacatcattgtagagataataaacctgtcctccgcgcaaaatttcacgcaggatcgcctcccggaccaccatgctgtcatactcacggacaaaggttttaactgccagacgacgggcgggcggcgtggcgataatgctcaggtcacgcattccgctcattgccatattcagcgtacgtgggatcggcgttgcagtaagcgtcagaatatccacgttcgcgcgcatcgctttaatgcgctctttatgacgcaccccgaagcggtgttcttcatcgacaatcagcaggcctaaatctttaaacttgacgtcactttgcagcagtttgtgcgtaccgatcagaatatcgattttcccttccgccacttccgcaaggatttgcgtctgctctttggcgctgcggaaacgggagatcatttcgatacgtaccggccagttggcgaaacggtcgcggaagttgtcgtaatgctgctgcgcgagaagggtggtaggcaccagcaccgccacctgcttgtggttatctactgccaggaaagctgcgcgcatcgccacttctgttttaccaaagccaacatcgccgcacaccagacgatccattgccagcggctgacacatgtcgctaagtaccgcattaatggcctgcgcctgatccggcgtggtttcaaacgggaagctgtcgcagaacaactgatactgctcacgatcgtgtttaaacgcgaagccctctttggcggcgcgttgcgcgtagatatccagcaattccgccgccacatcacgcactttttccgccgctttctgccgcgcgcgactccacgcatcgccgccaagtttatgcagcggggcgttttcttccgcgccacctgcgtaacggctaatcagatgcagactgctcaccggaacatacagtttggcgtcgttggcataggtgagcatcagatactcgccagtaatgccacccgcttccagcgtggtcattccggcataacgaccgacgccgtgctccagatggaccaccggctgaccaatatgcagttccgcaaggttacggatcagtgtatcggggttgatggtgcggcgagaatcctgacgacgacgggcaacgcgttcaccgagcagatcgctttcgcaaatcagcgccagattacgcaccgtatcgacaaaaccatgttcggcagcgccaatcatcagataacgcccacggtcgctggcttcatcaagacgcataatgcgttgcggagcaattttaattcgtgcgagcagttcacccagcgcttcacggcgaccttcactttctacgctgaacaccaccggaccgtcgaaagtctcgaggaacttacgcagcgcatccagcggcgctttttgttgtgcctgaacggccaggtctggcagtttctggaaacctaaattggcattcgcggcttttgtcggtaaatgttcagtttttagctgcacccggggccagtttttcagctcactgaagagctcgtccacccgcagccagaggctttgtggtggcaacagcgggcgcatcggatcgacgccgcgattctcaaaacgcgccagcgtgtcagcctggaaacgttcggcactggtttccagatcgccagtattcacgagcaaggtattggcagggaaataactgaacagcggcggcagtggttcgctgaagaacaatggctgccagtactcgatcccggcaggtaatgtgcctttactcacttgctggtaaatatgttctggatcgcgcttcacttcgaaggtatcgcgccactggctgcggaacagttcaattgccgctttatcggtcggaaattcgtgcgcgggcagcagattgatcgcttctacttcctccagcgtgcgctggctgtcgacgtcaaacacccgcaggctgtcgatttcatcatcaaagaaatcaagacgataaggcagctcactccccatcgggaagagatccagcaacgcgccgcgcgtggcgtattcgccgtgctccatcacctggtcaacatggcgataaccggcgctgtccagttgggttcgtaatgcatctcgactcaggcgctgaccttttttcatcaccagcgcatgaccgtggagaaaactgtgtgggcaaacgcgctgcataagcgtattcaccggaacaatcagtacgccacgctgcatcgtcggtagctggtaaagggtggaaaggcggctggagataatgtcctgatgagggctaaaactgtcgtagggaagagtttcccagtccgccagattcatcaccatttgatcggtaaactggctgatttcatcatgcaaacgcagagcattttgcatatctggtgcaatgagtaccaccggaccggcgtgacgttcggcaatttccgctaccagcgttgcacaggctgcgccggttaactcgcccagcagacgctgctcacccgctttgacgggcagcgtataacgatattgttcaggcataacggttgtcagattctcgttaggatatgcctcaacatatgggggcatatctctgataagcaatgctgttcattatccgtaatcgacatggtttagcaaattgaatcgccccggctggggcgatggcttagcgggagtaactgacggcagcgggcagactaggcggggagaacaacagatcgctgaatgcacgctgactaagttttcttaccagcaagcccgcaacagtacagatgaacaaactgacaaagggataaaccagcaggagtgtcagttcgacttgcgggctccagcgtgctgcgttcatttgcgcaagcagagttaagctgaatatttcaaccagaatgcgatgggtggtgtagatagcaatggtgttggagccaatcacattcagcaggctggtggagcgcataccgaatcgttgctcgtattgataaaacagcttcatgatcaccacaatgcttaccaggctcaacagcaggctgatagtaaacaaccaggcaccgaccgccagaacggtaagcaaagaagccatcagcagatggcggcgcaacggcacctctttaacacaggtcattattgttgcgccaaaccatgcgccaaggctgtaataaggcaaattgcggatcacactgttcattccccaccacggcgtgggaacgaaattaaccgccacactcagcagtacaaacaaggcgaatagtggcagcgccagacggctaaaaattttacataccacgaaatagacaattaacgcatacagataccacaagctggtgctggcggtgatcatcccgtgcaggaactcaccggtggaatcggcataagcggcattggaggcattgcttaaatcgcgctcaggtgccagccactggttcagcgcacttaacgccagccactgcaccacgccccaaagcgccagcacccagaagatgttccagatccgtttatcgagacaatttccccacggtacgctgtcgatatagcggcgaatcaaatagccggatataaagaaaaaaaccggcatacgaaagggggcaaggtaaagattgaaatagatccagcatttgctcaggacttcgcttaacggatgctgaaaagtggtcagatgcggataaaaggtaatgacgctgtgataaatcaccaccagacaaatacataaccctttgatctggttaatccatagctctttttgtttcatcaggacaacacgctcttttttaatttacatgcggttgatcctgcgggttatgacccgaggtgtaatgggtatctgtctgtattggatgatttttcagattaagatcaggcggcaagattgatgataaaacatggcaatttagccgattgatttacgggggcttttcagattagccctgacgatcacttacagttcagacgtttacccatcttgctttcgcttatatactcgtgtctttgctacagcaaccagacggatttcatgtaccaacctgtcgctctatttattggcctgcgttacatgcgtgggcgtgcagcggatcgcttcggtcgtttcgtctcctggctttctaccatcggcattaccctcggggtgatggcgctggtcacagtattgagtgtgatgaacggctttgagcgcgagctgcaaaacaacatccttggcctgatgccacaggcaattctctcttctgagcatggctctcttaacccgcagcaactcccagaaacggcagtcaaactggacggcgttaatcgcgtcgcacctattactaccggtgatgtggtactgcaaagcgcgcgcagcgtggcggtcggggtgatgctcggtatcgacccggcgcaaaaagatccacttacaccgtatctggtcaatgtgaaacaaactgacctcgagccggggaaatataatgtcatcctcggcgaacaacttgccagtcagctaggcgttaatcgcggtgatcaaatccgcgtgatggtaccatctgccagccagttcacgccgatggggcgtattccaagccagcgcctgttcaatgtgattggcactttcgccgccaacagtgaagtcgatggctatgaaatgctggtgaatattgaggatgccagccgtctgatgcgttatccggcaggcaatattaccggctggcgtttgtggctggatgagccgctgaaagtcgacagtttaagtcagcaaaaactgcctgaaggcagcaaatggcaggactggcgtgatcgtaaaggcgagttgttccaggccgtacgcatggaaaaaaatatgatgggtttactgctgagcctgattgtcgccgttgcggcgtttaacattattaccagtctagggctgatggtaatggagaagcagggcgaagtagcgatcctgcaaacgcaaggcttaactccgcgacaaatcatgatggtctttatggtgcaaggggccagcgccgggattatcggtgcgatcctcggagcggcgcttggcgccctgcttgccagccagttaaataatctgatgccgataatcggcgtcctgcttgatggcgcggcgctgccggtggctatcgaacctttacaggtcattgttattgcgctggtggcgatggctatcgcgctgctgtctacgctttaccctagttggcgcgctgccgccactcaacccgctgaggctttacgttatgaataagatcctgttgcaatgcgacaacctgtgcaaacgctatcaggaaggcagtgtgcaaaccgatgtgctgcacaatgtcagtttcagcgtcggcgaaggtgaaatgatggcgatcgtcggtagctctggttccggtaaaagtaccttgctgcacctgctgggcgggctggatacgccaacctccggcgatgtgatttttaatggtcagccaatgagcaaactgagcagcgcagcgaaagctgaactgcgcaaccagaagctgggctttatttatcagtttcaccacctgctgccggattttaccgccctggaaaacgtggctatgccgctgctgattggcaagaaaaagcccgctgaaatcaacagccgtgcacttgagatgttaaaagcggtggggctggatcatcgtgcgaatcaccgcccatctgaactttctggcggcgaacgccagcgtgtggcgattgcccgtgcgctggtgaataacccgcgcctggtactggcggatgaacctaccggtaacctcgatgcgcgtaacgccgacagcatcttccagttgcttggggaattgaatcgcttgcagggcaccgccttcctggtggttactcacgacctgcaactggcgaaacgtatgagccgccagttagaaatgcgtgatggtcgtctgacggcggaactgagcctgatgggggcggagtaatggcgatgcctttaagcttattaattggcctgcgttttagtcgcggacggcggcgcggcggcatggtgagcctgatctccgttatttctaccattggcattgccctcggcgtggcggtattgatcgtcggcttaagcgcgatgaacggctttgaacgcgaactgaacaaccgtattctggcggtggtgccgcatggtgaaatcgaggcggtggatcagccgtggactaactggcaggaagcactggatcacgtgcaaaaagtgccgggtattgccgctgccgcgccgtatatcaatttcaccgggctggtggaaagtggcgcgaatcttcgcgcaatccaggtgaagggcgttaacccgcaacaggaacagcgtctgagcgcattacccagctttgtccagggcgatgcgtggcgcaattttaaagcgggcgaacagcaaattatcatcggcaaaggcgtggcggatgcgctgaaagtgaagcagggggattgggtgagcattatgatccccaacagcaatcccgagcataaactgatgcagccaaaacgtgtgcgtttgcacgttgccggtattttgcagttgagtggtcaactcgatcacagttttgccatgatcccgctggcggatgcccaacaatatcttgatatgggttccagcgtgagtggtattgcccttaaaatgacggatgttttcaacgccaataagctggtacgcgatgcgggtgaagtgaccaacagctatgtttatattaaaagctggattggtacttacggctatatgtatcgcgatatccaaatgatccgcgccattatgtatctggcgatggtactggtgattggcgtggcctgtttcaacatcgtctccaccttagtgatggcggtgaaagacaagagtggcgatatcgcagtattaagaacgctgggggcgaaagatggtttaattcgcgccatctttgtctggtatggattgctggcagggctgttcggcagcctgtgtggtgtgattatcggcgtagtggttagtctgcaacttaccccgattattgagtggattgaaaagttgatcggtcatcagttcctctccagcgatatctattttattgatttcctgccaagcgaattgcactggctggacgtcttctacgtactggtcacagcattgttgctgagtcttttggcaagttggtatccggcgcggcgcgccagtaatattgaccctgcgcgagtccttagcggccagtaaaggcagtacattaaaacaaggagcggcaatgtattacgggtttgatattggtggaacaaaaattgcgcttggcgtgtttgatagcggtcggcagttgcagtgggaaaagcgggtgccgacaccgcgtgacagctatgacgcatttttagatgcagtgtgtgagctggtagctgaagctgaccaacgttttggctgtaaaggttctgtcggcatcggtattccgggaatgccggaaacagaagatggtacgctgtatgccgccaatgtccccgctgccagcggtaaaccgctgcgtgccgacctgagcgcacgtcttgatcgcgatgtacgccttgataacgatgccaactgttttgcccttagtgaagcctgggatgatgaatttactcaatatccactggtgatggggttgattctcggcaccggtgttggcggcgggctgattttcaacggcaaaccgattaccggtaaaagctacattaccggcgagtttggccatatgcgtctgccggttgatgcgttaaccatgatggggttggatttcccgttacgccgctgcggctgtggtcagcatggctgcattgaaaattatctgtctggtcgcggttttgcgtggctgtatcaacactattatcatcaaccgttgcaggctcccgaaattattgcgctttatgatcaaggcgatgagcaggcaagggcgcacgttgagcgttatctggatttattagcggtttgtctgggaaatatcctgaccatcgttgaccctgacctggtcgtcattggtggtggcttaagcaatttcccggcaatcacaacgcaactggcggacaggctgcctcgtcatctcttacctgtagctcgtgttccgcgcattgaacgcgcgcgccacggtgatgcgggaggaatgcgtggtgcggccttcctacatctaaccgattaaacaacagaggttgctatgctgagccgtcggggtcatcggttaagtcgttttcgtaaaaataaacgccgcctgcgcgagcgtttgcgtcagcgtatttttttcagagataaagtggtgccggaagcaatggaaaaaccaagagtactcgtactgacaggggcaggaatttctgcggaaagtggtattcgtacctttcgcgccgcagatggcctgtgggaagaacatcgggttgaagatgtggcaacgccggaaggtttcgatcgcgatcctgaactggtgcaagcgttttataacgcccgtcgtcgacagctgcagcagccagaaattcagcctaacgccgcgcatcttgcgctggctaaactgcaagacgccctcggcgatcgctttttgctggtgacgcagaatatcgacaacctgcatgaacgcgcaggtaataccaatgtgattcatatgcatggggaactgctgaaagtgcgttgtagtcaaagtggtcaggttctcgactggacaggagacgttaccccagaagataaatgccattgttgccagtttccggcacccttgcgcccgcacgtagtgtggtttggcgaaatgccactcggcatggatgaaatttatatggcgttgagcatggccgatattttcattgccattggcacatccgggcatgtttatccggcggctgggtttgttcacgaagcgaaactgcatggcgcgcacaccgtggaactgaatcttgaaccgagtcaggttggtaatgaatttgccgagaaatattacggcccggcaagccaggtggcgcctgagtttgttgaaaagttgctgaagggattaaaagcgggaagcattgcctgatgcactacgcttatcaggcctgcaaggggacgcaattaattgaatttgcgggttttgtgggccggataaggcgttcgcgccccatccggaataatacacgcgcacttttccggcctcttttatcgtttactcgtcaataacaatgcggcaataaacgtacagacaccaattagccctgcccagagtgggcttattctggtaatcgcaaagctattatcgatatacaaacataaagcctgataacccatattggcaatagtcatcgccactgcaaattttaacgcataaataaaacgagtcgtgtagtaaaagatcctggaaaataagataaacgtcgcagcccaggcgataaaacctaatgtgttggtgctgccggggggagcattttcatgctgttgtcctggatgcggataatacgttagtggcggcgtgctttgttttaatatctgtgcttgtagaacagccaatgcattattgattccctgataccagagatctgcatttaaataagccagcgtgtgattttctatcagaaggccgagatgtttatcgtccagaccactttcaacctggccgttggtgatcataattaaccgtggttcgcgggtagtaaatagtaacagaacacttccttttacatcactcaaactagaactcgcatgcgccagcatcgctttaccattttgtctgagactggcttcattattaatgtcgggtaaaaccacaataaacggtgcaattcccgtttgttggcgaaaaagctcggctttatgcgcgatctcttcagcatctggtacagtaccggtaacgtccgtaaaaagtgtcttcattattggaattaatggcttgctggctgctgtcagaggcaggagtatcagtaaactgagcagtataatgaattttttcatgggcgggacttccgtttcctgcgactttttttagaggagggcatacttattaataaaccgacggcgataaaaataacgcccataatgccgataaacccccatttaaaaaaattaacccacgggttatttatctcagccttttcaggatgcccgggagaataataaacattaactttatcgccttcgctgtcttcataaaaatcgctgccgatactgctattgaaaattagcgtgtaatctggcgtcggtcgaaaggcaacgacgggataccagctaccatctttacccgtgcgatgagaatgactggagtgccagacggtatcaacaatgacgccttcggtatgaatcgcgtctttgctataggtgaactggttataaaagacaacaacagaaatgaggatcagtaccagaccgataccgaggaatatacgaaagaaaactttactgtcctgactcattagccacatccttgctaactaaaaaacgggcggtaataccaccgcccgcttgctgaattaacgtcctgctttcagcttctgataatactcttcataaatgctgctggctgcgccaacgtcattctgccattcgccatttttaatggtttcagcatccgggtagagtgttttatcgttcgccacttctggacttaacagcttacgcgccgcaaggtttggcgttggataaccgatagtttcagcaacctgttttgccacatccgggcgcagcaggaagttgatcaatttcagcgcgccttctttgtttttggcatttgccgggatcgccaggctgtccatccagaaaatgccgccttctttcggccacaccacgtcaattggcgtacccgcctggcgtgcaacgaaagcagaaccgttccagatcatgccgaggttaacttcgccttccatgtacgggttcgccgggttatcggagttaaaggctgccacgtttggcatcagttttttcagctcgttatatgcagcttcaatctctttcggatcggtggtgttaccggagtagcccagcttacgcagcgccatctggaacacttcacgggcatcgtcggtcaacagcaggctgcctttgtactctggcttccacagatcggcccagctggtgacagatttcggatccaccgcatcaccgttaacaccaatcgccgtcgcaccccagatatacggaatggagtagtcgttattcgggtcaaaaggcttgttgagcatgtctggatcgagattgctgaagtttgttaacttgctcttgtcgatcttctggatcatcccttctttacgcattttatcaacgtaataggtactaggaaccaccagatcataggcaccgtctttgtatgttttcagcttggcgtacatggtttcgttgctctcgtaagtgctatagataaccttaataccggtttctttggtgaactgttcaagcagtcctggcggcacgtactcggtccagttgtagaaatacagcgtgttgttgtcatcggcgtgagcggcgctcatgcccagtgccagagcacccgccgcgagcaggtggcgactccattttttcatttaacgtcccctgtgttacctttcgttttatcacgagcaataagctggctggcaataaccatcaccaggctcagcaccagtaatatggttgccagcgcgttaacttccgggcttacgccgactttgaccatgctataaatttttaacggcagaatttcataacttggtccggtgacgaagctagaaactaccacatcgtccatgctcagggtaaagcttaacacccagcccgccgccaccgctggcattgccagtggcagaatgatttttcgcagaatggtaaattcgctggcaccgagatctttcgccgcttccagcattcgcacgtcaaaacctttcaggcggctatacaccgtcaccaccacaaatggcaggcagaaggtgatatggctgaacagcaggctccagaagccaagctgaatacccagcagcataaacagcaccagcaggctaatcgccatcacgatatctggactcatcatcaccacaaacagcattccgctaacgaacggcttaccacgaaagcgataacggtacagcgcaactgccgtcagactaccgataagcgtagcaaacgtcgcgctaaacaccgccattgttagactatgctgcgctgcctgtaacaggctgtcgttgttcatcagcaggctataccatttggtggtaaagccctgccagttgatgccaaagcggctgctgttaaaggagttcacaatcaaaataatgattgggatatacaggtacgcgtagatagcggtcataaaaccgccgcgaagcagtcgaccgatcattcgagttccaccttcttattcagcaaacgagaagcgcgccagtaaaccagcaacatcaggcccattacgatagtcagcgtaatgctggtagctgcaccaaacggccagtcacgaatattaaggaactggaccttgatgacgttaccgatcagcaggtttttcgcaccgcccatcaggtcggatacatagaacaggcccatcgctggcagcatcaccagcagacatccggcaataattcccggcatcgtcagtggaataatgatacggataaaagtctgtaacttgctggcaccgagatcgcgcgccgcctcaagcaacggcttatccagtttttcgatactggagtacagcggcatcaccataaacggcagcagaatgtaaaccagaccgataatcaccgcactgggcgtgaacatgatacggattggtgtgtcgataacgcccagccagagcaaaaactcgttgagatagcctttggtgctgaggaaaattttcagcccgtagatacgaattaaactgttggtccagaacggaacaatcagcagaaacagcagcagcggacgcaccttgtgtggcaacttcgccagaaaccaggcaaacgggtagcccagcaccaggcaggcgagggtggcgatcagcgccatattcaggctgtgcaatagcacttcaaaatagagcggatcgagcagacgcgtgtagttatccagcgtaaagaccattttgacaaaactggcgtcgtcgcgggtcaaaaagctggtgccaatgatcatcaggttgggcagaaagacaaacaacacaagccaaccgacaatagtgacaatcactacattctggaacttacttgtgttcttcatcagccagtacgacctcccagctttctacccaattaatggccattttttggtcgagagagtggtcaaagtcaggatcgtcttcattgaagaattcgctgaccatcaccatcttgccattttccagttcaacaacgctctccagcgtcatgcctttgtagttacgctcgcgaacgtaaccaatcagcccttcagcgtggttgtcgtcgttaatctcttcaacacgtaagtcttccgggcgcagcagaacatgcagtttttgccccggttcaacggcgaagttaacgtagatattacattcgcggccttcaacgttggcgcgtacgcgctgctcgtctagacgttcgatgacagtggcgttaaacatattgatttcgccaatgaagccggcaacaaacaggtttttcggctcttcgtagatttcacgcggcgtgccgtcttgctcaatgcgaccatcgcgcatcaccacaatcctgtcactcatggtgagtgcttcttcctggtcgtgagtcacaaagacgaatgtaatgccaagcttacgctgtaacgctttcagctcgttctgcatttgcttacgcagtttgtaatccagcgcactgaggctctcatccagcaacaacagacgaggcttgttaaccaccgcgcgagcaatggcgacgcgttgctgttgaccaccagagagctgatgcggtttgcgttgagcgaaggtttccaactgcaccatccgcagggcttccatcacgcggggcgtaatttcagcagcgggggttttttgcatgcgcaacccaaaggccacattttcgaacacggtcatgtgggggaaaagtgcgtagctttggaaaacagtgttcacatagcggttttccgccggaacgtgggtgatgtcctcgttatccagcatgatgcgtccggaatcaacagtttccagacctgcaatcaggcgaagaacggttgttttaccgcagccagaagggccaagcagcgtgaggaactcgccattgttgatagtcagatccagctggggaatgacctctttaccatcaaagcatttgcgaattcccgccaattgcaccagcggactaaggctactcggttgtttattcaattttttactctgtcccatgtaaacgcaacggatggcttaccgatgcggggtttgtggttaaccaccttggtgactcttaatgagggcggtaattctacggcaaaccgcttgaatcgccaatctttgttgtgaattactggcttagctttatattcattaaggtaatgctgataaatattcccgcttgcaggggtaaaagtgacctgacgcaatatttgtcttttcttgcttcttaataatgttgtcacaaaaagtgagggtgactacatggataaactacttgagcgatttttgaactacgtgtctctggatacccaaagtaaagcaggggtgagacaggttcccagcacggaaggccaatggaagttattgcatctgctgaaagagcagctcgaagagatggggcttatcaatgtgaccttaagtgagaagggcactttgatggcgacgttaccggctaacgtccctggcgatatcccggcgattggctttatttctcatgtggataccagtccggattgcagcggcaaaaatgtgaatccgcaaattgttgaaaactatcgcggtggcgatattgcgctgggtatcggcgatgaagttttaagtccggttatgttcccggtgctgcatcagctactgggtcagacgctgattaccaccgatggtaaaaccttgttaggtgccgatgacaaagcaggtattgcagaaatcatgaccgcgctggcggtattgcaacagaaaaaaattccgcatggtgatattcgcgtcgcctttaccccggatgaagaagtgggcaaaggggcgaaacattttgatgttgacgccttcgatgcccgctgggcttacactgttgatggtggtggcgtaggcgaactggagtttgaaaacttcaacgccgcgagcgtcaatatcaaaattgtcggtaacaatgttcatccgggcacggcgaaaggagtgatggtaaatgcgctgagcctggcggcacgtattcatgcggaagttccggcggatgaaagcccggaaatgacagaaggctatgaaggtttctatcatctggcgagcatgaaaggcaccgttgaacgggccgatatgcactacatcatccgtgatttcgaccgtaaacagtttgaagcgcgtaaacgtaaaatgatggagatcgccaaaaaagtgggcaaagggttacatcctgattgctacattgaactggtgattgaagacagttactacaatatgcgcgagaaagtggttgagcatccgcatattctcgatatcgcccagcaggcgatgcgcgattgcgatattgaaccggaactgaaaccgatccgcggtggtaccgacggcgcgcagttgagctttatgggattaccgtgcccgaacctgttcactggcggttacaactatcatggtaagcatgagtttgtgactctggaaggtatggaaaaagcggtgcaggtgatcgtccgtattgccgagttaacggcgcaacggaagtaagcgaaaagggatgcggcatgtgatgccgcatccggcttaaatccaaacttacccttcgaagaaccaatacccgctattgaccagcgccgcgagcatcgcgaggaaactcggatcttccagcgcatcgccaaaattctccgcagtcagcgcaatgttgctggcgagtgcatccagtgccggacggtgcggggaatcgatcttctcaccattggcatacacgtcgtcgccaatgcgcaatacgcgcagaccacccaggcgcaccagcacttcaccttgtttcagcgcatcgtagatttcatccggctgataaggcggctctggcggcgcgatatccagttcatgacgactctgggatataaactcgccaaaccattgcttaaagtgttccggctggttgatcaattcgagcatcatctcacgcagtttatccatctcttgcggcagaacatccgcaggatgagcgcgaggtggaacatccggatcgctgtagtagttgccgcccagttcacgttgcagcacataatcggcaaatccactaatcagttcccgcgtatttggcgcgcgaaagcccacggaatagttcatcgcattttccagcgcgtagccttcatgcgggaatcctggcggaatataaagaatatcaccaggctccagctcttcatcgatgatggcttcgaacggatcgacctgtaacagatccggatgtgggcagtgctgtttcatttgcagcttttcgcccactcgccagcgacgacgtccggtaccctgaatgataaacacgtcgtactgatcgagatgcgggccgacgccgccgccgggtacagaaaaagaaatcatcagatcatcaatacgccagtccggtagttcacggaacggtcgcatcagcgcggcggtcggctcatgccagtggttcactgcctgtaccagtaaactccagttggtttcaccgagatgatcgtagctttcgaacgggccgtggctgacctgccatttgccatcctggtgactgaccagtcgactgtcaacttcgctttccatcgccagacccgccaactcgtctggagagatcgggtcaataaaattattaaagccgcgttttaacaccaccgggcgtttctgccagtgacgttcaagaaaatcgggccagttaagagtgagttggtattccatgttaagcatccacaggctggtatctgcaaccgattataacggatgcttaacgtaatgcgtgaagtatgggcatatttattcatctttcggcgcagaatgctggcgaccaaaaatcacctccatccgcgcaccgcccagcatgctctctccggcgacgattttaccctcatattgctcggtgatttcgcgggctaccgccagccctacaccttgcccagggcgtaaagtatcaacccgttgaccacggtcgaaaatgacctctcgcttgcttaatggaataccggggccatcatcctcgaccacaatatagagatgctcgtcggtttgccttgcagaaatttcgacaaactcgaggcaatatttacaggcattatccagcacgttgcccatcacctcgacaaaatcgttctgctcaccgacaaagctgatctctgggctaatatcgagagagatattgacccctttgcgttgatacactttgttcagcgcactggtgagattgtccagcagtggggcgaccggatgcagctcgcggctgagcaatgtcccgccgcgcatactggcacgatgcaggtagtagccaatttgctgactaatgcggctgatttgctccagcattaccggctcagcatcactgacgctcatcttttcactacgcagagaacgcagcgtactttgcagcaccgccagtggcgttttcagactatgggtcaggtcggtgagcgtcgtacggtatttgtcgtaacgttcgcgttcactttttaacaatcggttcaggtttcgtaccagactggtcagttctcgcgttgtggctggattgagcaattcgcggttatgttcttccagttcgcggacttcttttgccagggcttcgatggggcgtaaactccaccaggcggcgacccacagcagcgggatcactaacagcagattggcactgagcacatagataaaccagctccagaccatataggaactttttagctccaccggaatggtatccaccaccacaatggttaattttggcatccggcttgttgccgggtagacgtttactgccacgctgtgggtcatctccgcgtcgtcatcatcttcccgcacttcctgcaactgttgctgtatgctatgatctccactcagcaagaggctggtatcgttaacatccgcttcaatttcatgaaaaccattgcttttcagccagtcaggctggatcatcttcatcagccagggcacgtcacgttgcgcccataaaagctgcccgttctcatcataaattagcgtcatggtggggctttgcttgtcgatattttcgggtaactcgacatgcaacttattgttttcccacttcgcaagggtatagaacagattgctctcgccacgtaacagccgaaacgtagttttatcgaaactgacgctataaccgatcagcgcgaccattccgtaggcaaggctaagcaccagtactaccgctgccgttgccaacagaaaacgtacccgcaggctgagcgggaaaaaaagacgcagtaattttttcatcagcgcaattcgaacagatagccctggccgcgaacggtggtaatcacttcttggggatattgtgcctgaatttttttgcgcagacgtcccatcagtacatcaatggtatggctttcccgcagctccgcatccggatagagttggagcattaagctatctttgctgaccactttgccattattgcgtatcaacgtttccataatagtgtattcgaacgcggtcagtttgatcacttcgtcattaatagataattcacggcgagagagatcaacctgaaacggggggaggctaatgacctgactagccagaccgctattacgccgcattaatgcctgcattcgcgccatcacctcttcaatatgaaacggtttagtcacataatcatcagcaccggcacttaatacttcgactttgtcctgccagctttcacgggcggttaataccagaatcggcagactaacatcgttgctacgccagcggcgaatcagactcagaccgtcctcgtctggcaatccgagatcgacaatcgcaatatccggtatatgttcattgagataataatcggcttctttggcatcttctgcgtcatcgacctgatgaccagcatcctgaatctgaactttaaggtggtgacgtaacaacgcattgtcttcaacaaccagtacgcgcatttttatttctccctgtcttaattattaaaatagtgtaacgcgattatgtggttatgggggtaaacattaaataaaccagcggggaggggaggtaaagtgaaaaaataaaaagcggataatcttaataagcaggccggacagcatcgccatccggcactgatacgaggtttatttcagctcatcaaccatcgtgatagctcgaccaatatagttagccggcgtcatcgctttcaggcgggctttctcttcttctggcaacgccagaccatcgataaactgcttcatgccttcggcgtcaacgcgcttaccgcgagtcagctctttcagcttctcgtacggtttttcgatgccatagcgacgcataactgtctggattggttcagccagcacttcccagttgtgatccagttcatccagcagatggtcacggttcacttccagtttgctcacgcctttcagggtggattgatatgcaatcaaggcataaccgatacccacgccgaggttacgcagcacggtagagtcggtcaggtcacgctgccagcgggaaaccggcagtttgcttgccagatgctgcaataccgcgttggaaaggcccagattcccttcggagttttcgaagtcgatcgggttaactttatgcggcatggtggaagaaccaatctcaccagcaatggttttctgtttgaagtggttaagggcgatataaccccagacgtcacggtcaaagtcgatcagaatagtgttgaagcgcgcaacgcaatcaaacagttcggcaatgtagtcgtgcggttcgatctgggtggtgtacgggttccactgaatacccaggctggtgacgaactcttcgctgaactgatgccagtcaacttccgggtaagcggcgatgtgggcgttatagttaccgaccgcgccgttgattttgccgaggatctccacctggttaagctggcggtactggcgctccatacggtaggcgacgtttgccatctctttaccgatggtactcggcgtggctggctgaccgtgggtacgagacagcagcgggatatcgcgatactgaacggcgagatctttaatgccatcaatcagttgacgccagtatggcaggatcacttcatcacgcgcggttttcagcattaatgcgtgggagaggttattgatatcttcgctagtacaggcaaagtggatgaattcagaaaccgcgtgcagttccgggatctccgccactttttctttcaggaaatactcaaccgctttaacgtcgtggttagtggtacgctcgatagttttgatgcgcgccgcatcttcttcgctgaaactggcgacgattgcatcaaggtaaccgattgcgtcggcagcaaaagcaggaacttccttgatcgctgcgtgcgcggccagtttttgcagccaacgtacttcaacttgtacacggaatttcagcaaaccatattcgctgaaaatcccgcgcagcgcgctgactttatcgccgtagcgtccatcgacaggggaaacggcggtcagactggataattccatagatcacaactccggggttaaatgagcaagaatttgttttgcctgagtggtcaggcgattacgagaaaacatcagttgcagacgtccgccgccgacctggtgccagagcacggcggcgcgaatgcctgccagcagggttgcgcgaactttcgcctgcacttgtgggctttgcagtacagcaggggaaccggtgacctgaatgcgcgggccaagcgggctaatcacatcaacatagatagcagccatcgcgctcatcagcgtttcggactgtaaatcgaagtgttcgagctggcgttgcaggccgttgatccggttgcccagagtgtcgagcgcgcctttcgcactggagagtttgcgctcaagcaccatcaagctgagtgtgtagcgggttaattcggcgtttaagccctggcgactgctggcattgagcacgccgagcagggtttccagcccgacgcgcaggttggcttcgctaccgccaaaaaccgccagcgtgctgctggggttcatatcaataatactgttgagactgacgtgtagcgcatcggcatcacaatgcccctggtgagcgagttgttgcaccaggcgtgcgctctgacaaataccggccagggcgagggtgatgtcatagtaattctttgccacgttcactgcttccttgttttaagtaaagataataatcagaccggcagcggcagacgctgctcaataataccgccaccgaggcacacttcaccgttatagaagacggcagactggcccggcgtcacggcggcaaccggttcatcgaaaatcacttcaatgcgatcatcgtccagcgccttgacggtgcaagggatatcggtctggcgatagcgggtttttaccgtgcaacgcatagtgccggtgaatggttcgcgatcgacccagtgcaactgctgggcaatcaacccgacagacatcagccgcgggtgttcatggccctgagcgacaaccagaatgttgttttcgacgtctttgtccaccacataccacggttcttcggtaccttctttggtgccaccgatacccagacctttacgctgaccgagagtgtgatacatcagcccctggtgctcaccaatttcatcgccatcgacggtaatgattttgcccggttgcgccgggagataacggcccaggaactcgcggaatttacgttcgccaatgaagcaaatgccggtagagtcttttttcttcgcggtgaccagaccaagatcttcagcaatcttacgcacctgcggtttttccagttcgccgaccgggaacaggctttgcgcaatctgctcatggctgagcgtataaaggaagtagctctggtctttattgctgtccagaccacgcagcaggcggctcttgccatcgacatcggcccgacgtacgtaatgaccggtagcgatataatcggcacctaaatcttcggcggcaaattcgaggaaggctttaaatttgatctctttgttgcacagaatatccggattcggcgtgcgaccggctttatattcggcaaggaacagttcgaagacgttgtcccagtactcggcagcaaagttaacggtgtgcagttcaatgccgagcttgtcgcagacagcctgggcatcagccagatccgctgccgctgtgcaatattcctcaccgtcgtcttcttcccagttcttcataaacaggccttcgacctgatatccctgttgttgcaacagccaggcagaaacggaggaatcgacaccgccggacatgccgacgattactttttttgcggtttcagacattggatcactcacgacattgaacttcaaggcggcgtattctatcacgcagccttttagatgacaccctttgtaaaaggccagttaaaatcgccaatcatctccagcggataacgttgcccgctttgataacaacgaatactttccgccaccagcgggctacgaagattactcgcctgtaaaatttcttcggcgctgacccaacggcagcagtcgatatcgctgtcatgaggctgggtcgggcatatttgctcaagctcaatggcaaagaggaaacgcaaaaacggcgttttatctggcgcaatccactgatgcatacgaataaagtgttgcggctgcgcgctgatgccggtttcttcccacagttcacgggcggcggcttccactaaggtttcatcggcttccagatgcccggcaggttggttccataacgctttaccattaatcgtctcttcaacgactaaaaatttgccttctgcgtgcaccacgcaagcaacggtaacgtgcggtttaaacattttgcatccttaatctgtcacttctcgccattcaccattggcaagattatccaaagagtaatcacccatcgcatagcgaatcagtcgcagcgtggggaagccaacatgggcggtcatgcggcgcacctggcgattacgtccttcatataaggtgatcttcagccagctggtgggaatacttttgcgttcacgaattggtggattccgcggccataaccacgcgggttcgtcaaccagctccgcgccggcgggcagggtagggccatcatttaaggttacgccattgcgcaaggcttcaagtgcgtcttgtgtgggaataccttccacctgcacataatagatttttccggtgcgtttacccggctgggttaaacgcgcctgcaacgcgccgttattggtcagcaccagcaacccttcgctatcgcggtcaaggcgacctgctgcataaacaccctgaaccgggatgaattcttttaatgttttgcgtccggcttcatcggtgaactgcggaagaacatcgtagggtttattgaacaggatcacacgcgtgggctggttttcaggtttacgcctggtagaacgttggctgctgaatcgcttaacctggtgatttctaaaagaagttttttgcatggtattttcagagattatgaattgccgcattatagcctaataacgcgcatctttcatgacggcaaacaatagggtagtattgacaagccaattacaaatcattaacaaaaaattgctctaaagcatccgtatcgcaggacgcaaacgcatatgcaacgtggtggcagacgagcaaaccagtagcgctcgaaggagaggtgaatggaaagtaaagtagttgttccggcacaaggcaagaagatcaccctgcaaaacggcaaactcaacgttcctgaaaatccgattatcccttacattgaaggtgatggaatcggtgtagatgtaaccccagccatgctgaaagtggtcgacgctgcagtcgagaaagcctataaaggcgagcgtaaaatctcctggatggaaatttacaccggtgaaaaatccacacaggtttatggtcaggacgtctggctgcctgctgaaactcttgatctgattcgtgaatatcgcgttgccattaaaggtccgctgaccactccggttggtggcggtattcgctctctgaacgttgccctgcgccaggaactggatctctacatctgcctgcgtccggtacgttactatcagggcactccaagcccggttaaacaccctgaactgaccgatatggttatcttccgtgaaaacagcgaagacatttatgcgggtatcgaatggaaagcagactctgccgacgccgagaaagtgattaaattcctgcgtgaagagatgggggtgaagaaaattcgcttcccggaacattgtggtatcggtattaagccgtgtagcgaagaaggcaccaaacgtctggttcgtgcagcgatcgaatacgcaattgctaacgatcgtgactctgtgactctggtgcacaaaggcaacatcatgaagttcaccgaaggagcgtttaaagactggggctaccagctggcgcgtgaagagtttggcggtgaactgatcgacggtggcccgtggctgaaagttaaaaacccgaacactggcaaagagatcgtcattaaagacgtgattgctgatgcattcctgcaacagatcctgctgcgtccggctgaatatgatgttatcgcctgtatgaacctgaacggtgactacatttctgacgccctggcagcgcaggttggcggtatcggtatcgcccctggtgcaaacatcggtgacgaatgcgccctgtttgaagccacccacggtactgcgccgaaatatgccggtcaggacaaagtaaatcctggctctattattctctccgctgagatgatgctgcgccacatgggttggaccgaagcggctgacttaattgttaaaggtatggaaggcgcaatcaacgcgaaaaccgtaacctatgacttcgagcgtctgatggatggcgctaaactgctgaaatgtagtgagtttggtgacgcgatcatcgaaaacatgtaatgccgtagtttgttaaatttattaacgggagcgtaacgctcccgttgttttttgttaggctgctaacggttatcaaaattttatcaaaaaaagttatcaaaacccctcggtagttttggggtaggctggccggtcaggtggtagttctactactagtctcccacatagatattccttagctttttattattgctggcggacgctcgttaatatttaaggtcttcattgattaagacatccccaaagttagttatgtattcactgttattaggacaattatgaattaccactccttacacccgctcaaatattgttaaattgccggttttgtatcaactactcacccgggactcgccaggggacagccaacaggcattgggtgcaatcaccttagcgttcaggtacatgcggaatgtaaaaaaggccgcgagcgcggccccttcacatacatctttagtactgagactgtttaacctagggaattattatcgtattatattgcattacaactcccaacagtgacatatgaacttcctgctttactccacgactttaatatttcaaggccatgtgaagaacatatttcttgcactgcgagttcatcgagtaatccatagtaagaaacactttttgaatttttgtaaatgtatccgtaaagatgttttcttcctgtttcgtattttttgaagtatgagcttttatattgatttacaataagagtctcacctcctgattttagtaatctcttgatgctaagaactatcagataattcaaagcgtggctgtgatgataggaattatgttttttacgtgaatgagaataatcttaaatgaggaataactcattgattgacaatatttttattcaagaagtgtcattgactgttaacgcaatgttgtaaaggtaagataatctgatttatcaatattattgtgtgatttttatgtgagcagaagatattcatcagcaacgattacattagtcattttattttgccgacggcctcattgtcgaaagataagcgtacgacagtattatcagaaaagagtgattttttatccaactacacttcagcgcactgcgtgtaaaaaatgcctctttcttatgcgggatatcatcatttcatcatgatgtctttggtgagcggtgaacacaatgcacctgcgctgtctcttcaggatgaatcccctggtctggtgcctgcgggctgatgttgcagcagagcttaggagtcttagacgctactatcatttatccaatggcatggaaagcaaaagtgtcgatacccgcagtatatatcgtgaactgggtgcaacgctgagttacaacatgcgcctggggaacggtatggaaatgaaccctggctgaaggcggctgtgcgcaaagaatttgtcgatgataaccgggtgaaggtgaataatgacggtaatttcgtcaatgatttgagcggcagacgtggaatataccaggcagctattaaagccagtttcagcagtacgtttagcggacatctcggggtggggtatagccatggtgccggtgtggaatccccgtggaacgcggtggctggtgtgaactggagcttctgaccatcaacgattaaactgcgcttcggcgcagttttcgtttacaggatgttgaaagggaaaattctggggcaaaaaaagcccgccagttacggcgggaaacctcatcctatgggagaacaatgaataatgaaattgcggggttatcatctcccagtatatccatactaacaataaggttatttactcaaccaggcataaacattttgttttgtgcgtgggaacagccttaaggtgtaaagggggaggtggaaatagcaatgaggagtatcagcaagaatactcgccgctttaccacaacgtggatgagagggatgaaaaactcaaggcagagataactctgccttgaagataaatgcgcttttacagcgggcttatttcagctcttctgcttccggtaaggtcacgttcagctcaagaatagaaatatcgccatctttttgctcaagctgtacggttaccatctcaggatcaatttgtacgtatttacaaatgacctcaagaatatctttacgcaactgcggcagataatgcggttctgcatcgctgcgacggcgttcagcaacaataatctgcagccgttcttttgcaatgttggctgtgtttttcttccggctgagaaagaaatcgagtaatgccataacttatcctccgaacaagcgtttgaggaagcctttcttctcttcttcaatgaagcggaaaggacgttcttctcccaacagacgttctacggtatctgcgtaggctttacccgcatcggcgttaatgtcgagaatgaccggttcaccctggttagaggcgcgcaatacactttgatcctctgggatcacgccgacgagtttgatgcgcaggatctccagcacatcttccatgctcagcatgtcacctctgcttacgcggcctgggttatagcgcgttaacagcaggtgctctttaataggctcttcgccattttctgcgcggcgacttttgctcgccagaatgcctaaaatacggtcagagtcgcgtacactggagacttccgggttggtggtaataatggcttcgtctgcaaaatagagtgccattaacgcaccggtttcaatccctgccggggagtcacaaacgataaattcaaaatccatcgctttcagatcatcaagaactttggcgaccccttcacgggtgagggcatctttatcgcgtgtttggcttgccggcagaatatagagattttcagtacgcttatctttaattaacgcctgatttagcgttgcatcgccctgaatgacgttgacgaaatcgtaaacgacccggcgttcacaacccataatcaggtcgagattacgcaggccgatatcaaaatctatcacgacagttttctttcccttctgggccaaaccagtggcgatggccgcgctggaggttgtcttaccaacaccccctttgccgctagtaacaacaataatgcgtgccatagaaattccttgttaaaaagggatcaatttaacggttgaacggtcaaagcgttttcgactaactgcagtcgcgccgctttgccataaaattctgctgggatttgatcactcagccagtattcacctgcgatggacaccagttccgccatcaggttcgtacaaaatatttgcgtttcccggtcaccacttgcccctgccagcgcacgaccgcgcatcatgccatagacatgaatgttcccatcggcaatcaattcggccccagcgctaacgtggcttgtaacaatcagatcacattgtggagcataaatacgctgaccggaacgcaccggggtatctattaaacgcgtttttgtgaccggcgttgtattttgcgctggagcctgcggtgtgggagctggacgtggcgctttttcctttccttccgtcaggataggcagccccatcttttcaatttcggctttaagttgcgcatctttgcagccacttacgccaataacccgcaaaccggttgcgctaaccgccttatgcatcgcactccagtttaccgggtcttccagtgcactgacgttgagtacaacgggggcatgttttaaaaatgcgggggcctgagcgattttgtcttccagcgcctgatggataaccttaggttctgcctcatgcagatgaaccacagataaagtgaagctactgcctttaagctcgattggcgtgttactcatcctggccttactcaattagctattaatcatcgccagcgcgcgatgatgttccgaagactataaggcatgttatagtctggattatattgaggcaagtcaccctcccatttattcagagtaaaagtctattctgtgataaatggcgctgattcatagcttaaaaaatacccttgtcaatcaacccattgccgtcgtacttttgattgttcttatttacgcttcctttttccgcaccctaatcgtgacagcatctccagacctgtttaaatatccagtattgaggcaagtgtattttttcaccacgccaggctttcttaactttccattttttgcggcatcattaaagaacagatacccgttatcttaatatccgccacagaattgctctatcatagaaaccgcagaagacgtctgatacttctgtcaggtcatcgtaactcgtccaggtcagcggttttgattacggattgatgatgaaatgagcataagtgttgtacggttggattatcaggatgtgctatgaatatgatgcgtattttttatatcggattgagtggtgtggggatgatgttcagtagtatggcgtctggaaatgacgctggcggacttcaatctccggcgtgcggcgttgtttgcgacccgtatatttgtgtgaacagtgatggcatttccccagagttaacaaggaaatatctcggcgaaaaagccgctgaaaacttacaaagtttacaaggctacgatcccagcgaatttacattcgctaacggtgtattttgcgatgttaaagaaaaattatgtcgtgatgatcgttattttggtgtggatggtaagcggagtggaaaaatcaatcaaaccaccacaaagatgttatttatgtgtcgtgagtgatgtcttgtttacattatgttctattcgtcattaacctcttgagcgacagagaggagtggggcattaacgtttatgacggggagagtccccgtcggttgacatttacttaatttgaatatcgacgttatattttttagttttgtttttacgggcgtcgtttcgggtttgcaacactcgcagctcatatttgccagaagcagggagactgtattgtccgtgactatcgagttctggggaatatctggataaatcaacactatcatcgattcctggcccgaagaggtaagtatcagcgccttcattagagatactcacatgcactttctgaccttttttggcatagaaggtatatgtatcgtaatcgtatccctttatttcgccggagtactgagcgctgctatggccttttctgaactcaacattgacattcttacccgcagcaaagctcgtggaggttagcagtgcaagcagcaatacagccttcctgatgctcttgattttcattggtagtctcctgttcagaatgagtacgatgaactgttataatataacaatccctaacgggagaattccagtggctttcctgcgttcggtaaaatcacgttgcggcatttttgccggggggattacttataaagggggcatggactcaacaaaccgtagaaatctacagctggctggcttgtggcgcgggtttcattgatgttagcttatgccaaaacctggcatcttaaagagtaaaagtatgttttgtgtgatttatcgaagcagcaagcgtgaccagacctatttatatgtcgaaaaaaaagacgattttagccgtgttcctgaggaactgatgaaaggttttggtcagcctcagttagcgatgattctgccgctggatgggcggaagaaactggtcaatgccgatattgaaaaggttaaacaggcattaaccgagcaaggttactatttgcagttaccgccaccacccgaagatttgctgaagcaacatctttccgtcatggggcagaaaacagacgacactaacaaataaccgatatccggcggtggcattatctttgtcggcgcgggttttcatatccacgataaggtgaggggaacgttatgtatcaacatcacaactggcaaggtgcgctgctggattatccggtgagtaaagtagtctgtgttggcagtaactatgccaaacatattaaagagatgggcagcgcagtgcccgaagagccagtgctgtttattaaaccagaaacggcactgtgcgatctgcggcagccattggcgatcccatccgatttcggtagtgttcatcatgaagtcgaactggcggtgttgattggcgcgacactgcgtcaggctacggaagagcatgtccgcaaagccattgccggttatggcgtggcgctcgatctgacattgcgtgatgttcagggaaaaatgaagaaagccgggcagccgtgggaaaaggctaaagcgtttgataactcttgtccgctttccgggtttattcccgcggcggaatttaccggcgacccgcaaaatacaacgctgagcctgagcgtaaacggcgaacaacgccagcaaggtacgactgcggacatgatccataaaatcgttccgctgatcgcttatatgagcaagttttttaccctcaaggccggtgacgttgtgttgacaggcacgcctgatggcgtcggcccgttgcaaagcggtgatgagctgacagtcactttcgatgggcattctttgacaactcgcgttttgtaatactttttgccgcctgaaagcggcggcaaaacttgcatcgctgtgccagactggttataaggtgcgttttaacgtaatggcggaacacctgatgagcgatgtacctttctggcaaagtaaaaccctggacgaaatgagcgatgcggaatgggagagcttgtgtgatggttgcggtcagtgttgcctgcataaactgatggatgaagacaccgacgaaatctacttcactaacgtcgcctgtcgccagctcaatattaaaacctgtcaatgtcggaactacgaacgtcgtttcgagtttgaacccgactgcattaaattaacccgtgaaaatctgccaacattcgaatggctgccaatgacctgcgcttatcgtttgctggcggaaggtaaagatttacctgcgtggcatccgctacttactggtagcaaagcggcaatgcatggtgaacgtatctctgtgcgtcatatcgcagtgaaagaaagtgaagtgattgactggcaggatcatatcttaaataaacctgactgggcgcagtgataaatttaatagatgctgatgggggctttcttaatatacgtctggatgctcgccatttcgtagccctgtttttgaaagcgctctgtcataatgagagttacccgataccttattatcaacaggtaactctcaatctttaaaaaacgtctgtgtttttaaatgtgataaaccttataccttgagtacatggagagaataatcgcttatcagacttcaggtacctcaaagagtgtctttttaccgtgtcttttctgatactcattacaggtgttaatcatttttttggccgcttcttttagcaaagaaagcattaaatcatcataatcaacgtagaatctggttgtttcagtttccgtttttatctcaccgatggcggctatttcggtggttaatttcaatttggcggcatcgatatctttattcgcttgtttaaccgtgttagacagggtggtaaagaaattctgcacagattttaacttgttcttcaattctggaatcagttttccttcaactacgcccgcagcaatagaataggaaatgattaatccaaatggaccggcgacgacaccggctgcggcaccggcatatgcttccttcctgattttatctacctgactctggaaatagctgcttttttcactaaaatcattggttaactggctatctaacgccagcagtttcccggaagcgttgttgaaactttgactgcttaccagcagggatttttgcgcttcattcagcttcgtgatgccgtcatccagtaccttaatgagaatgtctttctgggcggatgctttcttctcattgtactcatcaaatagcaaaatatacgctgcgagcaattgcgtcgcaacaccacaccattcatacactgtttgggttgcttcaaaatacttatcctggctatccataagtaaggttttaatatcgccgactaaaacggaggctgcctgactatactcctgtttaaagcgacttaactcttttatggtttcatcaaaggtctgccaggggatgacctgatcgagatatttattataaagatctaatgctccatctgcggtttcgattgcgtttttaactacttctaccgttttatctgcaacgatttcagtcataatcattcgcctctttaaatatataaattgtaatgaaactcctgttttacaactattaataaattttacttcatctaattcatagttagccgggcgggatgcgtcaatgtctttatttctattaatatgataaatatcaaacaatgtttaatgtcattatggcgaatgcttctattctattttttagccgggtgatatttttcatttctgctggatgagcgtcgtcgccagaaggccacgtgagcacaagataagagaacgaaaaatcagcagcctatgcagcgacaaatattgatagcctgaatcagtattgatctgctggcaagaacagactactgtatataaaaacagtataacttcaggcagattattatgttgtttatcaagcctgcggatctccgcgaaattgtgacttttccgctatttagcgatcttgttcagtgtggctttcctagtccggcagcagattacgttgaacagcgcatcgatctgaatcaactgttgatccagcatcccagcgcgacttacttcgtcaaagcaagtggtgattctatgattgatggtggaattagtgacggtgatttactgattgtcgatagcgctattaccgccagccatggtgatattgtcatcgctgctgttgacggcgagtttacggtgaaaaaattgcaactacgcccgacggtacagcttattcccatgaacagcgcgtacagccccattaccatcagtagtgaagatacgctggatgtctttggtgtggtgatccacgtcgttaaggcgatgcgctgatgtttgccctctgtgatgtaaacgcgttttatgccagctgtgagacggtgtttcgccctgatttatggggtaaaccggtggttgtgctaagcaataatgacggttgcgttatcgcccgaaacgctgaggcaaaggcgcttggcgttaaaatgggcgatccctggttcaaacaaaaagatctgtttcgtcgctgtggcgtggtttgctttagcagcaattatgagctttacgcagacatgagcaatcgggtgatgagcacgctggaagagctaagcccccgcgtcgagatttacagtattgatgaggcattctgcgatctgacaggtgtgcgtaattgtcgcgatctgactgattttggcagagaaattcgcgcaacggtgctacaacgtacccatcttactgttggtgtggggatcgcccagaccaaaacgctggctaagcttgccaatcatgcggcaaaaaaatggcagcggcagacgggtggggtggtggatttaagtaatctggaacgccagcgtaaattaatgtctgctctccccgtggatgacgtctgggggattggacggcggatcagcaaaaaactggacgcgatggggatcaaaaccgttctcgatttggcggatacagatatccggtttatccgtaaacattttaatgtcgtgctcgaaagaacggtgcgtgaactgcgcggcgaaccctgtttgcaactggaagagtttgcaccgacgaagcaggaaattatctgttcccgcagctttggtgaacgcatcacggattatccgagcatgcggcaggccatttgtagttacgctgcccgggcggcggaaaaacttcgcagcgagcatcaatattgtcggtttatctccacgtttattaagacgagtccatttgcgctcaatgaaccttattacggcaatagcgcgagcgtaaaactgctgacgcccactcaggacagcagggatatcattaacgctgctacgcgatctctggatgccatctggcaagcgggccatcgttaccaaaaagcgggcgtgatgctgggggatttcttcagtcagggagtcgcgcagctcaatttattcgatgacaacgcaccgcgccccgggagtgagcaattgatgacggtaatggatacactgaatgctaaagagggcagaggaacactctattttgccgggcaggggatccagcaacaatggcagatgaagcgagccatgcttagtccacgttatacaacgcgaagttctgatttactgagggtcaaataaatatagcggcaggaaaaaagcgctcccgcaggagcgccgaatggattagcgaccgaacagatcacgttttttcgctttaaacggctgggaaatcaccaccagcactgcgacaatcaggtaagcgataaaaataccgagcagccactgcggcatttccagacctaaaaaatcccactgacgctcggcgcaatcgccagaggcgacaaacacttgcggcacccacttatccagcggcagccattccgggaaacgaaccataaaatcacaggtggcaaacgggctaggatagagctgaagcatggtgtgctcgtaagttaactgcacaccgcggaacgcactatacaaccagataaccatcgctacataacgcagcggagttttcggggcgatcgcgccaatcagcgcagcacccagaacgccgaataacgcgcagcgttcataaatacagagcacgcaaggtttcagtaacatcacatgctggaaccacagcgccgtcagttccagtgccagagcagtaaacgccatcaacagccacgcgccccggccttgactacattggttcaaaaatcgcaacataatcatttccctgcaatatgcatagagtgcgcagtttaaaccaattcattcgctgcgccaccaggaggcagcaaaaataggacgcaattggacaattatcgggcgaaaaggcaaaccgggcatttatatgcccggtaagttgttatcaaagcgttgctatccagcccatttgcataaaccattcggttacaggggcaagcgtaaactcgacgcagagcaagccgacgagtgtcaggacgagggtgtaaggcagggccatccacaccatgcggccataagagaggcgaatcaatggcgcgagtgcagaggtcagcaggaacaggaacgcagcctgaccgttcggcgtagcgacggagggcagattggtaccggtattaatggcgaccgccagcagctcgtattgcttcaacgtgatagcgccactttccattgccgctttcgcttcgttgatataaatcgtccccacgaagacgttatcgctaatggaactcagcagaccgttgaaaatatagaacaggctcagctgagcatgttcgcttgcctgcaacacaaactgaataattgggctaaacagttgttggtcgataatcaccgcgactacgctgaaaaacaccgtcaacagtgcggtgaatggcagagattcggtgaaggctttaccgatagcatgctcatcggtgacaccggtcaaacttgttgccagaataatgacactcaaaccaatcaagccaacttccgccagatgcaacgccagcgcagtcaccagccagacgccaataatcgcctggacaatcagacggattttatcctgacgggtacgctggtggcggctttgatcgtcaaactgttgcaacacttcgcggactttctccggcagcgtttcaccgtagccaaaccaacgcagcttctctaccagcaggcaggttaacaggccacaaatcagaaccggaacggtcaccgggctcatgcgcaggaagaaatcgccaaaatgccagccagccgctttagcgatgatcaggttctgtggttcgcccaccatggtcattacgccgcctaatgcggtgccgacaccggcatgcatcatcaggctacgcagaaagccacggaactgttccagaaccactttgtaatgcttgtcgatatgactatcgtcttgcaggtcggtgtcttcggtacgggaagaggctacgcggtgataaataccataaaaaccgactgcaacgctgatcaccaccgccacgacggttaaggcatcgaggaacgcggagaggaacgcagccgccacgcaaaaagagaggctcagcagcattttggagcgaatgcttaacagcaaacgggtaaatatgaacagcaacagctgtttcataaaatagatacccgccaccataaacatcagtaacagcaagacttcaagatttgccgccacctcttcacggacgtgttccgcgctggtcatgccgatgaataccgcttcgatagccaacagaccaccggggagcagcgggtagcatttcagggccatcgccagagtgaaaataaattccgctaccagcaaccagcccgcgacgaaagggctgatgaggaaaattaacgggtttacgattaagaaaatgatgagggcgagtttgtaccagtcgggggactggcccaaaaaattgcgccatagcgcgcggccccaggagatctccatgatggtttcccttaccttacaaataatcaatgatgtttttatgtttaaacgcaaagcttaacggtcaggcaggagtgaggcaagtcttgatagtcaaggggaaagagatgcggaaaatgaagccttgatccctttttcttctttttgtctgctatcagcgtagttagccctctggtatgatgagtccaactttgttttgctgtgttatggaaatctcactatggtcattaaggcgcaaagcccggcgggtttcgcggaagagtacattattgaaagtatctggaataaccgcttccctcccgggactattttgcccgcagaacgtgaacttagtgaattaattggcgtaacgcgtactacgttacgtgaagtgttacagcgtctggcacgagatggctggttgaccattcaacatggcaagccgacgaaggtgaataatttctgggaaacttccggtttaaatatccttgaaacactggcgcgactggatcacgaaagtgtgccgcagcttattgataatttgctgagcgtgcgtaccaatatttccactatttttattcgcaccgcgtttcgtcagcatcccgataaagcgcaggaagtgctggctaccgctaatgaagtggccgatcacgccgatgcctttgccgagctggattacaacatattccgcggcctggcgtttgcttccggcaacccgatttacggtctgattcttaacgggatgaaagggctgtatacgcgtattggtcgtcactatttcgccaatccggaagcgcgcagtctggcgctgggcttctaccacaaactgagcgcgttgtgcagtgaaggcgcgcacgatcaggtgtacgaaacagtgcgtcgctatgggcatgagagtggcgagatttggcaccggatgcagaaaaatctgccgggtgatttagccattcaggggcgataatcccttccgtttaaagagcaaacccctcaaacgaggggttttttgttgtttttacagatttcccattcttggcgggcaacgttccagcaactcgatgctgccgtcttcgttttgctgttcgagcatcacatcaaatccccacaggcgatgcacatgcttcaggacttctttgcgcccccgatccagcggtgcgcgattatgtggaatataacgcagcgtcaggctacggtcgccgcgcaaatccacgttccagatctgaatattcggctccagattacttaagttatattggctgcttaaccggttacggatctcccgataaccttcttcattatgaatagcggaaatctccagataattatgccgatcgtcatccagcacggtgaagaagcggaaatcacgcatcactttcggactcaggaactggctgataaaactctcatctttgaaatcacgcatcgcgaaatgcagcgtttccagccagtcggaaccggcgatatccgggaaccagtatttgtcttcttccgttgggctctgacaaatccgtttaatatcctggaacatggcgaacccgagggcatacgggttgatgccgctgtaccacgggctgttataggggggctggaagaccacattggtgtggctgtgcaaaaactccagcataaaacgttccgttactttcccttcatcatacagatggttaaggatggtgtagtgccagaaggtcgcccagccttcgttcatcacctgagtctgtttttgcggataaaaatactggctcaccttacgcacaatacgcaggatttcacgctgccaactttccagcagtggcgcatttttctccataaaatagagcaggttttcttgtggttcggacggatagcggcgcgcttcagcaaccgttttctcttcctcgcgcttcggcagggtacgccagagcatattgacctgactttgcagatactcttcgcgacttttctgccgggctttctcttcttgcaggctgattttttgcgggcgtttgtaccggtccacgccgtagttcatcagcgcgtggcagctgtccagaagccgttctacttcatcaacgccataacgctcttcgcactcggtaatatatttacgggcaaaaatcagataatcgacaatgctactggcgtcggtccagctacggaataagtaattgtttttgaagaaagagttatgcccatagcaggcatgagccatcaccagcgcttgcatggtaatggtgttctcttccatcaggtaagcgatacacgggttagagttaatgacgatttcataggccagtccttgctgaccgtgcttatacagccgttcagtctcgataaactttttaccgaaactccagtgcggatagttaattggcatgccgacgctggagtaggcatccatcatctgttcactggttatcacttcaatctggtgcgggtaggtatccagccggtagagtttcgccacccggtctatctctgccagataaacatccagcaggtcgaacgtccagtcgggtccatcgctcaaacgtgtggtgtccttattcatagaatcgatcgtcgccatacgcgcacctcattgttgtcggcgctctctgtgtggagcacctcatttcaagcatagaacacctgttaaaaaccgcgtcgccggagaatttttttctttgcgatttcttattatcagagtgccactaatccgcttctgaacggaattttatgctggataaaaagggcgttcagcaggagatactaaagacgccatattgccgcagagtcagggagatgtgagccagctcaccataaaaaagccgcatgttgaataatattttcaactgagttatcaagatgtgattagattattattcttttactgtatctaccgttatcggagtggctatgcgagttgtcatactgggaagtggtgtggtaggcgttgccagcgcctggtacttaaatcaggcaggacatgaggtcaccgtcattgatcgggagccgggggccgccctggaaaccagtgccgcgaatgccgggcaaatctcccccggatatgctgcaccgtgggcggcaccaggtgtgcctttaaaagcgattaaatggatgttccagcgccatgcgccgctggcggttcgtctcgacggtacgcagttccagttgaaatggatgtggcaaatgttacgtaactgcgacaccagccactacatggaaaacaaagggcggatggtgcgtctggcggaatacagccgtgattgcctgaaagcattgcgcgccgaaaccaatattcagtatgaagggcgtcagggtgggacgctgcaactgttccgtaccgaacaacagtatgaaaatgcgacccgcgatatcgccgtgctggaagatgccggcgtaccgtatcagctgctggaatccagccgcctggcggaagtggagcccgcgctggcagaagtggcgcacaaactgacgggcggcctgcagttacccaatgatgaaaccggagactgtcagctatttacccagaatctggcgcggatggcggagcaggcgggggttaaattccgctttaatacgcccgttgaccaactgctttgcgacggcgagcaaatctacggcgtgaagtgtggcgatgaagtgattaaggccgatgcgtatgtgatggcgtttggttcttacagcacggcgatgctcaaaggcattgttgatattccggtgtatccgctgaaaggctacagcctgaccattccaattgcgcaggaagatggtgcgccggtatccaccattcttgatgaaacctacaaaatcgccattacccgtttcgataaccgcattcgtgttggcggaatggcggagattgttggttttaataccgagctgttgcaaccgcgtcgtgaaacgctggagatggtggttcgcgatctctatccacgcggcggtcatgtcgagcaggcgactttctggactggtctgcgcccgatgacgccagacggcacgccggttgtcgggcgtacacgctttaaaaatctgtggctgaataccggtcacggcacgctcggctggacgatggcttgcggttccggtcagttgttaagcgatctgctctctggtcgcacgccagcgatcccatatgaggatctaagcgtagcgcgctacagccgtggatttacgccaagtcgtccgggccatttacatggcgcacacagctaaggaaacgagatgacccgtccgatacaggccagcctcgatctgcaggcattaaaacagaatctgtccattgtccgccaggccgcgacgcacgcgcgcgtctggagcgtggtaaaagcgaacgcttacgggcatggtattgagcgtatctggagcgcgatcggggccaccgatggctttgcattgcttaacctggaagaggcaataacgttacgtgagcgcggctggaaaggaccgatcctgatgctggaaggatttttccatgctcaggatctggagatttatgaccagcaccgcctgaccacctgcgtacacagcaactggcagctcaaagcactgcaaaatgcgcggctaaaagcaccgttggatatttatcttaaagtgaacagtgggatgaatcggttgggcttccagcccgatcgcgtgcttaccgtctggcagcagttgcgggcaatggcgaatgttggcgaaatgaccctgatgagccattttgccgaagcggaacatcctgatggaatttccggcgcgatggcgcgtattgagcaggcggcggaggggctggagtgtcggcgtagcttgtccaatagcgcggcgactctgtggcacccggaagcgcattttgactgggttcggcctggcattattttgtatggcgctagcccgtccggtcagtggcgtgatatcgccaataccggattacgtccggtgatgacgctaagcagtgagattattggtgtccagacgctaaaagcgggcgagcgtgtgggctacggcggtcgctatactgcgcgcgatgaacagcgaatcggcattgtcgccgcagggtacgccgacggttatccgcgccacgcgcctaccggtacccctgttttagtggacggcgtgcgcaccatgacggtggggaccgtcagcatggatatgctagcggtcgatttaacgccttgcccgcaggcgggtattggtacgccggttgagctgtggggcaaggagatcaaaattgatgatgtcgccgccgctgccggaacggtgggctatgagttgatgtgcgcgctggcgctacgcgtcccggttgtgacggtgtaacttgttgtaagccggatcggaggcaacgtcttctgggtgcaaaaaaatcatccatccggctggtcagcaactgtagttgttaatgtgacagagccattgcccatgatagtgtccattaaaaggatggacactatttccccggaacctgaactcaccgcacaggcgttctacataaaacgcttacgcttcattgttgactcgaactcgacttcagataaatcacgctttacccttgatggagcctgtacatagatttgtgtaattgcctgattttgatatgttcaattcaacatcaaatgaaggttaaattatggacgacaaacaattgcaggctcaggctgcgttcagcaaagcatcgcaaccggcgatagatgcttcattaaatttaagattcagcttcctcttcagccacccgtacgccaatcttcaacacttcattatcttctttctcggccaccgtccagatcatcccggcaaactctacctggtcaccgacaaccggtgccgcgcctaacaactgctggacaatttcacccagcgtttgctgcttatcacgatattctcgcccgtcttccaggccatatatcagcgcaacatcagcatatttggcgctggcttcgagaatgaagtcaccaaagaagcgttgatccagcgcgaccggcgggctctggctgaacagtttaccgagcgccggaagatcgcgttcccgaccaattacacacaacacatcgccttcgcgcagtcgggtgctgccggtaggatgaagcaactggttatcacgaaacagtgccgcaatacgcgtctcttttggcatatgcaaatcgcgcagtgccgcgcccacgcaccatttatcggcactcaattgataaacaaactgctcccacggattttccggatgaatatccaggccaacgcgactcaccggacgtcccactggcggaaccaccactttggcttttttagccgcccagctgagacttgttccctgcaagagcagactaaccagaaccacaaagaaggcgacattaaagaacagacgtgcattctccagccccgccatcatcgggaacacggccaggatgattggcaccgcgccgcgtaatcctacccagctgataaacacgcgctcacgcagattgaaaccgcggaaggggagcaatccagcaaatacgctaaggggacgggcgaagaatatcatccatgcggacaaaatgagcgccggaatggcaataggcagcagatcgcttgggttaaccaacagccccagcaccaggaacatggcgatttgcgccagccaggcgaggccgtcgaaattttgcaggatgccgtagcggttgcgaatagggcgattacccagcagaaaaccgcacagatacaccgccagaataccgctaccttccagcgcagtagttaaactgaaaatcagaataccgccacttaatgccagcaatggatataatccggcgggcagggcgatgcggttgatcatttgcagtagtaaataaccgccgccaagacctattacaatgcccagaccaaattgttgcagaatatcgacaatgaacatccagctaatattgctctcatgatgctggatcatcgcaattagggtaatcgtcagaaagaccgccattggatcattactgccggattcaatttccagcgtgctgccaacacgttcgttaagccccttaccacccagcagagaaaagaccgctgcagcatcggtagagccgacgatagcgccgattaataagccttcaatcaaatcaagattaaacagccacgccgccatcatgccggttaaaccagaggtgataagcacgcccagcgtcgccaggctcagtgccggtcctaacgccacacgaaaggaactggcctgagtgcgcatcccgccgtcgagcaaaataatcgccagtgccaggttacttaccatgtaggcgaaggggtaattatcaaacgggataccgccgacgccatcgactcctgccagcatgccgatcgccagaaaaataaccagaataggaatgccaagacgggaagaaaaactactaagtaatatactgctggtgacaaggatggatcctaagatgaaaaggctaattattgttgtggcatccaacggtcggttactcctgattacgctgtctcttatataaaccctaccatattagcggcagagacagcgttttacttagccctgaagcgtgatttttttacattttaagaacaggatgaccgctaatcgtcaactgagtgccttcccgggtgttattcagaatggcatgtgcgcccaacggcagcgtaaccgtgcgttgttcatgaccaaaatcgaggccggtaatgagtggaatgctcaggcgggaacgcaaaaacgcgtacacactctccaggttgtaacctgcgtcataatcattgggcgtgctgccgctaaagctaccgagaataatcgccttctgacgtggcaaaattcccgcatgatagagctgcaacagcatacgttcgacccggaaagggtgctcgttaatatcttccagcaccagaataccgttctcaatttttggcatccacggtgtaccgatcagactaatcagcatcgcaagattgcctccccacaacgtgccttcggcccgacatgtcgggccttccccttgccattcaatggtgaaggtttcattgcgtaacgccagccagaaatggtgctcggtaaaggcgttcagttcatccgcgccaaagtttgctaccagcatggggccgctaaaggtgatgacattgccatgcgccagaagaccgcactgaatggcggtaaaatcgctatgtccgcaaatgagcaacgggtcatgttgttggcgagccaccagtgcctgccagtcaatatctgccagtaaacgactggcaccgtaaccgccgcgtacagccagcacgatggtgttgggggtagtcagtctggcaagggaattgagatcttccagacgctctgtttccgtacccgcaaaacgctcacaacgacgggcaataacctcgacgttattgacttgatgccccgcgtcggtaaggcgctggataccacgcagcgcggcgtgctgtttaatgcagtaaccgcttggggcaattaagtgaaacagagacatggcaattccttgctgacaacagaaacgaaatgtatatcatgccgcttaggtgtgccgttgtcacctcaacggcgattccaggctataaggatagaagaagtgaaattgagatggtttgcctttttgattgtgttattagcgggttgtagtagtaagcatgactatacgaacccgccgtggaacgcgaaagttccggtgcaacgtgcgatgcagtggatgccaataagccagaaagccggtgcagcctggggcgtcgatccacaattgatcacggcgattatcgctatcgaaagcggtggtaatccgaacgcggtgagtaaaagcaatgccattggtttgatgcagttaaaagctagtacctccggacgtgatgtttatcgccgtatgggctggagtggtgagccgacgaccagcgagctgaaaaatccagagcgtaatattagtatgggggcggcttacctgaatattctggaaaccggcccgctggcaggcattgaagatccgaaggtactgcaatatgcgctggtggtgagttacgctaacggggcaggtgcgctgctacggactttcagcagtgatcggaaaaaggcgatcagcaaaatcaacgatttggatgctgacgagttcctcgaacacgtagcgcgaaatcaccctgcgccgcaggctccgcgctatatctacaaacttgagcaggcactggacgcgatgtaaatcagtcgcgcactttgtccgctttttcccgggcttctcgctcgagagagaaaataatccgctgtaattgccgctccaccgtcgggctgacgttaagaaaacggaagctcagacggggagtggtgatggtttcattcttgccatcaatcactttgcgctcgctgatggagattaactgggcgtcaaagtgaaaaacaccccattgccccatgttgacttcaatctgagcgaagcgcatgccttcttgtaattcggcaggctttgctgtttccagtaatgcgcccatgccgcctaagctcaaatcatacaggcggaaacgtaacgtactgttatccgccagtttggtctggcaaaaataaggcggatggagtggggcggagatgcggaaatatcggcgtcgttgtacaaaccataaggtgggaggcggtacggtaataaatgccggaagctgcaagtattcactctgctgtagttgttcaacagtaaactcgactttcgcaccctgagtttcggcggtaatggtaatgtgctgtgcctttagcacggcgatgttgtcttcggcttgactgccgaaatccagcaccagtttatccggggttattgccagtaatttgctgatcagctgcccgccattccaactgagacgcaaaggaattgcggctttgtgcaaatcgcgtaacacgcccaggacggctaacggattttgtttcaggaactgctcatggtaatgactcacgcggaaaaactcctgactgacaaactgtctttggtttatcggtcacagttaacaaaacttaatacaaatgcgtgaatattttttacatgttgttcttaaatcagccgacatacgcccagcatcgatcccgcccttgcctatacttagagcgttgatgtaagcatttcttgcgtccgattcatcgaaacgagggcctgaacatgggaattattgcctggattatttttgacctgatagccggcattatcgccaagctaatcatgccggggcgtgatggtggtggatttttcctgacctgtattctcgggatagtcggtgcggtggtcggcggctggctggcgaccatgtttggcattggcggctccatcagtggttttaatctgcacagcttcctggtggcggtggtgggagctattctcgttctgggcatattccgcctcctgcgaagagaataagattttcataaggcggatagcgatacagatgccgctatccgctttcacatcagaacgtatactcgacacctgctttacgggtgaaaaaaatcaatatagcacttcgatatccgataaagtcggttcccggtaacaacaacagaatccttttttaattattgtttcgttgtttttggtgtgattcagaaaataaatattttagacagtagccagagtggcgttaaaaatggggcggatagtgaggcggttttggctgcgcttattgaacatttagaattgatcaatccttctggcagattaagccaaaatacccgtagcgcaatgcttcagttacgcgaagaggaatggtctgaattctttttttggttgctaaattctctggagtgtctggattatgtgattattaatttaactccagaaagcaaaaaaacgttgatgagtgaacaccgtaacaatattcaggtagcaattgatgctttatatagccaacgtcggcgtaaaagcccgggtgatgaaagtgaaacacttacccgtagaaatgacgctatcttcggcaaccacgtatggcaaacatttgcgcaatacttcccgccaggacttgaaaaaccgtctgtgtaaaaaaaaccatagctatggtgttatctgccgacaacgccatccggagaagccgaatgacgttgtcggagtaagcgctggttaaggtgtgggttgtgcctctttggtactgggttgcgtcgttgcactcttaacggtcggacgcgtcgccggaacattgtcacacggttgctctttcgggcagatcaaatccagcattttcagcgtcacgccattggtccagccaaagccatcctgtaatggatattcgccaccgccgccccccgttccggtggtgctgacatcatatttttccaccagctttttctcccggtcataggtgtgctgaacattggtcaggaagtgccagctaatgtccatcgccacctctttttgcccgtagttttgtaatccttctgtcgcgacccactgtaacggtgcccagccatttggcgcatcccattgttgcccacttttcacgctcgtggtgttcaggccgccgggttgcagcagatgtgttttcgtcgccgtcgccattttgttggcgcgatctttcgctgccgcattgacgtacagcgggaacagggcggccgcggttaactgattgcgcactttatgacttttcaggtcgtaatcggcataccagccttgttgatcgttccacaggtatttttcgatccctttttgacgggcatttgccagcgtttcgtactggtttgccatcgcgttatctccggcagctttgctggcgcgggcgaggattttttccattttaaacatcaggctgttcagatcgaccggtacgatgctggtggtgcgtaaggtatttaactgctgcgggttgtccatccagcggctgctgaaatcccagccagacgcagcggcagagcgcaggtcgcggtaaatttcagtggcaggtcgattcggattgcttttggcggtggcaatatcttccacccaactctctggtcgtggcgtatcgcgatcgtcccagtagcggttgagaagggtaccatcctgaagtttgacaacgcgtttttcctgttgtccggcttgcaggttttcaacaccgtccatccagtaagcatattctttttgcatttgcggcaggtattgcttcaacgcggcatcgccttcatgctgcgccagtaactctaccatcagggcaaagaagggcggttggctgcggcttaaatagtaactgcggttgccgttgggaatatgaccgtaagtgtctatttcatgagcaaaattggccaccatatccgcgactttatcccagtgaccgctttcggcaagtcctaacatggtgaagtaactgtcccagtaatatacctcgcgaaagcgtccgcccggcacgacataaggttccggcagcggtaacagagaatcccatttttcggtgttttcggtagaacgcgttaataccggccaaagtccgtcaatatgttcgcgcagactctgcccctctggcggaacatatttctcgccttctttcggcagggtgaaattgacgttaacgaaatggcgcagatcaaatccgctctggttttgctgcatccgataatcagcaaggatcatcagcggatcgctgttcggcacggcatcggcaaaggttttttggtccggaaaaagtttggcgttttgcacatcattaaacagcggccctaataaaatatcaggcggctgtggtgttaccggtgtttcttctgcctgcacgcttagcgcagcgaaacacaaaaagatacaggctggaattaacgccattttttgcgggcgagaaggtgcgggggatttcatcaatcattctcctttggcgaaaccgaataaaacggtattcaagtatcagaaaaccttagttcaggatcgcactagctgcatgatcgaaatctcattctgcgaactgtcaggcattttagaaaagggaattaaagggataaataacggcgaaatagagtgatcaaataacgtctgtttattagccagccagcggcgttgggttcgtgattagcgaagaaaaatcatcataaattggtgaaaaatataacaggtagttaaaaaccattagtgctgagtaaattgccggatgacatcagaacgatgccatccgaacagtggcttaaccctgacggttgaaacgttgcgttttaacgtccagcgttagcgtttcttctggttgtatcgcatacagtttctcaccctgctggcaaatccagccaatccccagttcacgggcgattagggcgctgtgggataccggacttccggcgctaaggcagataccttttacaaccgccggatccagttgcagtactgtggaaggataaatgttctccgccagtagaatagttgggctgttaaactgcgggagttcttctttcgtttgggtcaggtggaccagggtgcgatgcagaagatcgtccacatcaatatagcgagcttgtagatattcatcatccagttgctggtattgctggctaagttctttaagaacttgctgccaggcatattctgccgtgcaatgttcatgctgaaggagttcgcttgccgccgccagcagttccggatcatctaacagtgtatggtgaccagaaaagattgcggcaatatcgtcaagcccgctggcttctgctttcgctgttaacgtcatcagatctaataacgtgaagtcaatagcctggcgtaatcgatcttgttcttcttccacggtcagggtactttttgcctgtaccgtacataaaactggttgataataaaaggctttaccgctaacaggcggaacgggacgcagagtaggtggagcgacttcctccgtttcaccaaagttatcttcagccagctgacggaaagcgatcagtgcctcttcagcttctggccctttcgcaatcaggcgcagcgtatcgttatagcgaacttgtagtaacgcaatctggttaatactctctggtgtgacgcatttgccgtttttttccagcaacatatcggcattaaatgtgcttaaggtataaaccagccgggaggccggacgtacatgcaggccgttacggttttttatgaccaccgccagagaacgggcttcttcatcgtacgcaggacatgtgtcagagatttcagtgtcggaggacggtaaacccagttgttcacgtttggcttccagcgcatgcatggcgtcaaagataactttgtcgatatccgccccgctggccgcgctgaccgttgctgccagtgtaccttcgaccaacggcgcagcacacaaacgtacttttgcggcgatctcgggagccagcaattccagcgcagtttcagcactcaataatgcgctacccatatccatcatgaccagcacatggtcggcatcagcaacagattcgatggcctccatcactttgacggcatcggtaccaatgggattttgtggatcgtcaattcccgcggcaatggcgattttacaactatcactcattaacatctgacgggctaattcaccgacaccttctcccagtcggctgctatgactaactatgaccaggtttaccatcaccaattccttactcttttgcggctaacgccaacatttgcatcataaacatcacgctggtcgcgccgggatcctggtgaccaatactgcgttcaccgagataactggcgcggcctttgcgggcttgcatcgtaatcgtactttgtgcagcggattcggcgatgctactggcagcttcgagcgccaccggaacagagagattttgctcgctggactgacgtaagctttccaccaccggcacccacacatcacacatggttttatcgccaggttcggctttcccgcgactgattacgccgtccgcgccatcgcggaacatctgataaagctcttccagtgtcaggctttgccgtgcctgggtcgcctgtgcggcgcggataaagaaggtaccgaacagcggaccactggcaccaccgacgctggaaagcagcgtcataccggtattcttgagaatgaaaccgatatctttatctgcgatagcagggagtttttccaccactttgctaaagcctcggttcatatttagcccgtggtcagcatcgccaatttcgcgatccagtccggtaagatactcgctctcggtgctgaaaatatcgccacaacgagtgagccagttaacaatttgagttctgctcagactcattgctttctccttatttaccccagttaagggccggggtgtggaccggggcgtcccagagtgccagcgtttcgtcatcaactttcagtaaggtgatactgaaaccggtcatatccagactggtgcagtacgcgccaattaaattacgttcgatagtcaatcccgcttgctggcaacgtgtggtcaggcggttatagacgccgtacagctcagaaagcggagttgcgccaagattgttaaccagcgcaatcacccgatcgccagactggagcggttgtttggtttgttgttcttcctgccaactgccttgttgataatcccagaaacgcaaagtgcgatggtaactgccatttaccagcagggtgtcgaacatttcatcgacggtttgatcaagggaagagaaggggcggcggtcaatacccggctcaccatgaatgccgacgccaaactccatctcattatccgccagggtaaaagaaggtttgcccgcggcaggaacggtacaggcaccgagagcgatacctatactgtggccttgattattcagcttacgccccagttccgcacaggcgtccagactgtcgccacgctccgccgctgcgcctacgagtttttcaattaatacggtgttggcaacgccgcgtcgcccggcagtataaagactgtcttttaccgcaacgtcgtcatcaatgaccacagtggtcacttttacgccgctatcgtgcagtaactcggtcgctgtttcaaagttaagaatatcgccggtgtaatttttgataatcaacagtacaccttcgccgccatcaacttgcatggcgcattcaaagattttatcgggcgtcggactggtgaaaatttcgcccggacaggccccgctaagcatcccctgaccgatataaccacagtgcatcggctcgtgtccgctgccgccaccgctcagcagggcgacttttcctgcaacaggggcatcagctcgggtgacatacaccggatcctgatgcagtgtcaggcttggatgcgctttcgccagtcctgccagttgttcgtccagtacgtcttgcacatcattgatcaattttttcattattttgctccagcaattacggtagggcatggatgatgttcaacgacacggcgaccactgactgccgatgaatccattgtgcatcaggcaagggaaaagaaaattagcccaaattatgtttcatagtgaaacatatgctttaatgaatgttccatattgaaacttttacgtgtattaatacttaaaattgcgagccggaacaccttttgtcataagggatgcgggatatgagtggcgcttttaacaacgatggtcggggcatatctcccttaattgcaacctcctgggagcgatgcaataagctgatgaaacgggagacatggaacgtaccacatcaggcccagggcgtgacatttgcttctatttatcggcgtaagaaagcgatgctgacgctcgggcaggctgcgctggaagatgcctgggaatatatggcaccgcgagagtgtgcgctgtttatcctcgatgaaaccgcctgcattctcagccgtaatggcgatccgcaaaccttgcagcagctaagtgcactgggattcaatgacggcacgtattgcgccgagggaattattggtacttgtgcgctaagcttagcggctatctctggtcaggccgtgaaaacgatggccgatcaacatttcaaacaggtactctggaactgggccttttgtgcaacgccgttgtttgacagcaagggccgattgacgggaacaatagcgctggcgtgtccggttgagcaaactaccgcagctgatttgccgttgacgttggcaatcgcccgcgaggtcggaaatttactgctgacggacagtttgctcgctgaaactaaccgtcatttaaatcaacttaatgccctgttagaaagtatggatgatggcgtgattagctgggacgagcagggtaatttgcaatttattaatgcccaggcggcgcgggtcttgcgccttgacgcgacggcaagtcagggacgggcaatcactgaactcttaacgttacccgccgtattgcaacaagcaataaaacaggcacatccgctcaaacacgtagaagcaacctttgaaagccagcaccagtttattgatgcggtgataacccttaaaccgataatagaaacgcagggaaccagctttattttgttgctccatcctgtggaacagatgcggcagttgatgaccagtcaattaggaaaagtcagccataccttcgctcatatgccacaggacgatccgcaaacccgccgcttgattcattttggtcgccaggcggcgcgcagtagctttcctgtcctgctttgtggagaagagggcgtgggcaaggcactgctaagtcaggcaattcataatgaaagcgagcgtgctgcaggtccttatatcgccgtcaattgtgagttatatggtgatgctgcgctggcggaagaatttattggtggcgatcgcacggacaatgaaaatggccgtctgagtcggctggaactggcacacggcggcacgctgtttcttgaaaagattgaatatctggcggtggagttacagtctgctttgcttcaggttatcaagcagggggttatcacgcgactggatgcgcggcgtttaataccaattgatgtcaaagtgattgcaacaacgaccgcggacctcgcaatgctggtggaacaaaatcgttttagtcgccagctgtattacgcgctgcatgcatttgaaattaccatcccgcctctgcgtatgcggcgtggcagcattccggcgctggtgaataacaaattacgcagtcttgaaaaacgcttctctacgcggctgaaaattgatgacgatgccctcgctcgcctggtttcttgtgcatggccaggcaacgattttgaactttacagcgtcatcgagaatcttgctctgagtagtgataacgggcgcattcgcgtcagtgatttgccggaacatctgtttaccgagcaggcgacagatgatgtcagcgccacccgcctttccaccagtctgagttttgcggaagttgaaaaagaggcaattattaacgcagcccaggtcacaggcggtcgcattcaggaaatgagcgctttacttgggatcggccgcactacgctgtggcggaaaatgaagcaacatggcattgatgcagggcagtttaagcgccgggtatgaaagacagaaacgatttctgatacatcagagtgatctgtatttcattccggcgcacgctaacaattttcagcatcgtttaagggcttgtctatcccgcacttaaaagctgaagcgatatcctccgttgacttgcttctgatcaaagaggttaccctgcgtgtaatccgcttcgagatagaatgtgtgctgtttgttatactgtgcactgactcccacgccgttattccagccattacctttgaaactgtacttctcccgggagttgttcaacagatattcggtatccccactaaactcgcggatagcgccagtcttcacatagacattcagctggctgttgcctgcggtgatgtcataccccagtatcatgctggcacgccccagcaggctttcgtagtgattcagatgtatattgaggccattactcgccttcatagtcatctcattctggtggctgtatgtaagctgggtttgcggctctatatagaacccataaccagtaggggacaggttgaacctctgcccggcttccagggagatgctcattccattcgcagtgccgttggcgttaacgccgttgttctgactgtccagtacgtggaaactatttttctggcggcttgcttttataacgagatcgctgtaaaaaccgttttgtgccatgtaactggcgtacattcccatgtagtcactacgtgcggtaccgtcgcctccgctatagtccgggcttgcatgtgtactgccaatatacagaccgacatacaacggcattacatcagagagacgtttatccccaccaaactggataccgctgtaacccatgtcaaagccgctcagtttgccactggcaaaggagtccaggcttcccccataactgcgcaaccagatattaccgtctttactctgatttcgcaggtcacccatccgttgcatcagcgtacggttttcaacatagttcaataagtaaccgacattgagataattgccgccagcatctgcggtcgtggtgggtttaggcgtgggagcgggttcaggcgtaggatcggggttgactatgggaggctgagcgggagctggtgtgggttcaggattaggagtcggttccggaactgtcccggaagcgtaaagctcccagttagtgccatttttacgcacatcgtacagatatccccccaactcaacctgagaagacgcgctgaagctggccgcgccgtcagtggtttttaccactgtcagaacttcatttcccgttgtggcctcgctgccctggttgcggatagccaatacgtgattaccagcactactcccgctgatattcaataaatcccctttattattaacgccattaccctcgccaacaacatcagcacgcataataaaggtactgttaccgctcaggttctctacgtttaatgtggcaaatgtgccggcagtactcccgtggctggcaaaatcgacagtactatggctcagcgccagcgtgtcgagattagaattacttgttacgttccagacgctgttattcattgcaacgtccagttttccgccattgacattatcgctgagggaggaacctgtccaaacgttcccagggtgcatatccagattgattagcccacctttggaaagaacgctaccgttgataagcatacgaccgctggcgttgatgcggctggcggcataaccatcgtcatgttgcgttgcgatggccatctggtcgggtgtactcatatcaatgaccagatcgctcgtgaggtcgatctggctgttggtcatggcataaattcccctggctcctgccgcgccggtgatagccaaactgtctccggttattctaccgccgctgagagcccacaaacccagcgccagactgccattacgatcaactgtaatatcggtattttgcatgttgacaacagccgttgccgtctgggcgctggcaccataagaaccgccggaaaagatgctgtttcgttgcgctgccgtgccagtaaaattgattatcgcgtcactaccactggtgacgaggccaccgccctgcgcggaagaaatatggctatctgcaccgatagtggttgtaccaccacgaacttcgacgccattggccgcggctccagttacatcaacagtgagtgcattcgcgctaacctggccaaagctccagaggccgtgagcattatcgccattggttttaatggtactgtttgttccgagatcgacaacagagtttttctgtacgtttatccccatggcgctgtagccctgaacatcgattgtcaggtctgtagccgtaaaacgcgcagcaccattggcgttattgccgttgagaccaccgatataaacacctgtacttccatcggtcgtgattttacttccgcttccaagatcgacactggtgccatagtcattgatggttaggcctataccgttgctgttttcaatggtgaattgagtggctgttagtgtactgctatgcccaataatgatgccgtcatcgttactcttaatggtgctgcctgtgcctaagtcagcatgggtatagtcaccaattaagttaatgccgatggcagaggtttgaccaacaacatctactgtgagtcggttagctgtcagggagctgtttttgccctgaataatgattccttttgcatatccagaggcgtcgttgacattgacggtgacatcattacccaggttgatattgccaggcgtgtttcctgctggggtcattacaccatagaggtttccacttggatcggcggtatctcctgtaattctgtcaccatcattaatagtaatattggtgccatattgacttcctgtatcagcagctatcagcaggggggaaaagataattgcattcaaaccaatagcgccaaattttatcagttgaatactggggctacggatttttaattcagcgagacgatctgctttggtattcccattgtgttgtttgatgcccataccactcctatatagtacccagactatgggtctatggattttgtcattttgtttaaatcaatgaataatatcctcttatcatcatgatatttgtatggtgcaatcatgatgagcttctcagagaataattctctattaccgggcaaaatcaggaacacaggaattaatatatatttaacatcccccttacaaaggtgagtttatatcgagttattccctaagttgtcgttacttattccaattcgttactataaatatggcaaaaatattacaacaaacagcggttaaaaaatttggtgaagattttttgtaataatcctaattagttatgggaatttcgcttgatgtatctgcataacaaaaacaatatgcgccatttttgcattactaataagaaaaagcaaaaaacatcgatattcatttttggtcaatgggttttctggcctatcgttgttattgtgctactggttatcattttcatcttgccagcatattggagcgtgatcaattttgatcagctgtgaagggggctgatgtgtagtgatacaaaaacttacgttatatcactgctaatgagatatccggcatctgaacacttatgtctttaattattctcgtggttcactataggcaataagcacaaaagtgtaggatgttacaagaatgattaggactcggtgaaatgaaaaatccacgcaattgcgtggattttatatacttttgcgctcttcatgagatttagcgaaacctcatgagacaataaattaattagacgttgaaaaggaagttcatcacatcgccatctttcacgatgtaatctttaccttctgcacgcattttgcctgcttctttcgcgccttgttcacctttgtaagtgatgaaatcttcaaagctgatggtttgtgcacggataaagcctttttcaaaatcagtatggattttgcccgctgcctgcggcgcggttgctccaaccggaatggtccatgcacgcacttctttcaccccagcggtgaagtaagtttgcaggttcagcagtttataaccggcacggatcacacggttcaggcccggctcttccagcccaagctcctgcataaactcgtcacgttcttcgtcgtccagttcggcaatgtctgcttcaacagcagcacaaaccggaaccacaacagaaccttctttcgccgcgatttcacgcacctggtcaagatatgggttgttttcaaaaccgtcttcgttgacgttggcgatgtacattgttggtttcagcgtcaggaagctcaggtaacgaatagccgctttctcttcagcgcttaaatccagcgcgcgcagcatacctgcattttccaactggggcaggcatttttccaggaccgccagctcagctttcgcgtctttatcgccacctttggctttcttctgtacgcgatgaatcgcacgttcgcaggtgtcgaggtctgccagcgccagttcggtgttgataacttcaatatcgtcagccgggttaactttgccggaaacgtgaatgatgttgtcattttcaaagcagcgaacaacgtgaccgatcgcttcggtttcacggatgttggtcaggaactggttacccagaccttcgcctttgcttgcgccttttaccagaccggcgatatcgacaaattccatggtcgtgggaagcgtacgctgcggttttacgatttcagccagttgatccaggcgaggatcaggcattggtacgacgcctgtgttcggctcaatggtgcagaatggaaagttggccgcttcaataccggctttggtcagcgcgttgaacagggtagatttcccgacgttgggcaaaccgacgataccgcatttgaatcccatgatttaaatcaccttaatatcttaataatcaacctgttattgctaacagattgcagaaatggaaataactttgcctattatacacggcactcggcaaaaatgccgcagacaacgacttattgcgctttaaaggcgtgcaatcggttcgttgctttggtcaagccatctgtaaaccacatttcagtacaacgcgccgcttcgtcaatggcttcatcaattaacttctgttcactaacaggcggtttgcctaacacaaaaccgacaactttatttttatcgcccggatgaccgattccgatgcgtaaacggtgaaagttagggttattacccaatttactgatgatgtctttcagtccattgtgaccaccatggccaccgcccaatttaaatttggcgacgccaggaggcagatccagttcgtcgtgggccaccagaatttcgtccggattaatgcggaaaaaactggccatcgccgcaacggctttgccgctgagattcataaatgtagtcgggactaacaggcggacatcttcgcctccaagagtgactcggctagtataaccaaagaatttagcctcttcgcgcagcggagcgcgcaaacgctctgccagtaagtcaacgaaccaggtaccagcattatgtcgcgttgcggcgtattcagcaccggggttcgccaggccgacaatcaatttaatcgtcacgtttttttgtcctgagtgtgtacataactggcgcgtagtttactggttgcggccccgcttgacaaaaaactgcgtatcaaatgcagataacgtaataattgcctgagtggactattagaaagtcaaggtgttcaggcgtttatttgtaaagttttgttgaaataagggttgtaattgtgatcacgcccgcacataacccactgggtgttgtctatactttacacataaggaagaggggtattccctgttacaacccagaaagttccggaggtgacatatgaaacgcaaaaacgctagcttactcggtaacgtgctcatggggttgggtctggtggtaatggtggtcggcgtggggtatagtatcctcaaccagttaccacagtttaatatgccccagtatttcgcacatggtgcagtgctaagtattttcgtcggtgccattctctggctggcgggtgcccgtgttggcgggcatgaacaggtgtgcgaccgttactggtgggttcgccactatgacaaacgttgccgccgtagcgataatcgccgtcatagctaacaaataatgcagtttgctgaccagtcagtttgcgctgactggtcaatctcgtacttataaatccgccatcgccgcgcgacgattcgggaagaacgccaggcgtcccgggatcggttgaatgccagcgcgagccatagtgcgcagtggctggaattccacgttgcacacgcgcagttcacatccctcgggcagacgcttcacaaaacgctggaacgcatcaagaccaccagcatcaagtaccggaacggcatcccacttcagaatcacaatccgtttgccttcaagacgactctccaggtccgtgaataagccttcagcagcagcaaaaaacagcgggccaataacgcgcagaaccaggacatcgtctggaacatctacgactaccggtgccaggcgagtcatacgtgcgatacgacgcataaacagcaggcttgccagcacgatccccacgctgatggcaataaccatatcaaacaacacggtcaggctcatgcacagcagcatgacgatgatgtcatctttcggcgcatgacgcagcaagtcgaccactttgtgcgcttcactcatgttccacgccaccatcaacagcagggctgccatggcggaaagcggcagccaggagagcagcggtgccagtaccagcagggcaagaataaccagaatagagtggatcaccgcgctgataggggacgttgccccggcacggacgttagcggcagaacgcgcgatggcagctgtagcggtaataccaccaaagaacggagcgataatattccccagtccctgtccaaccagttcgctgttcgccttgtgtttcgtcccggtcataccatccagcaccacggcgcagagcagagattcgattgcgccgagcattgccatactgaatgccgcaggcagcagtgtgcgaatagaatcccaggttagcgtgaattcactattaggcagatcccacggcagcaccagttgcggcagcagttgcggaataccgttaccctgagaaccatcggccaggacgtagtggaattggctaccgatggtagcaacatgtccgccgagcaggttaacaatccccatcaccgcgcaaccagccagcaaggccggaaggtgaccgggtaaacgaatgcccagacgcggccaaaaaacaagaatacctagcgtcacaatgccaatggcagcatcacccacattaatggtcggcagcgccataaataatgcgccgactttttgtagataatgttccgggacatgggccatttgcagaccgagaaaatctttaatctgcatggtaccgatggtgatcccgataccgctggtgaaacctaaggtgacggaaaccggaatatactcaatcaggcgaccaaagcgtgccagacccatcagaatcaaaaagatcccgctcagcaaggtcgcaaccagcagtcctgccagtccaaactgttggctcacgggatagagaattaccacaaatgccgcagtcggaccggaaacgctaaagcgactcccacccgtcagagcaatgacaatccccgcaacagctgcggtatataaaccgtactggggtgccacaccactaccaatagccaacgccatcgccagcgggatagcaataatcccgacggttatcccggcaatcaggtcacgggtaaaccgtgcggcagtatatttttctttccagcaagcgtcgatcagagcgcggaaaggcatcacatgactggaaaatattttgttcacaataatgtttcatccgtgagcgcatcatctgtcaactaaatggcaggtgaaggaggcataggtcatacaaatggatattacagacaaaaaaacccgccgcagcgggtctttgagccgggttcgattagtgttcgaacatggcagagatgctttcttcgttgctgatacgacgaatcgcttcggccagcataccactcagggtcagagtacgcacgttcggcagacttttgatttcatcgctcagcggaatggtatcgcagacaacgacttcatcaattacagagttacgcaggttgttcgccgcgttgccagagaagatcgggtgagtcgcgtacgcaaatacacgtttagcaccacgttctttcagagcttcagcagctttacacagcgtaccgccagtgtcgatcatatcatcgaccagtacgcagtcacgacctgcaacgtcaccgatgatatgcatcacctgactaacgttcgcacgcggacgacgtttgtcgatgattgccatatcggtatcgttcagcagcttagcgatagcgcgggcacgcacaacgccgccgatgtccggagaaaccacaattgggttatccagattcagctgcagcatgtcttccagcaggatcgggctaccaaatacgttatcaaccggaacgtcgaagaaaccctgaatctgttcagcgtgcagatccactgtcagcacacggtcaacaccgacgctggagaggaagtctgcaaccactttcgcagtgattggtacacgagcggaacggacgcgacggtcctggcgcgcatagccaaagtaggggataacagcggtgatacgacctgcggaagcacgacgcagggcatcaaccataacgactaattccatcaggttgtcgttagtaggggcacaagtggactggatgatgaaaatatcaccaccgcgtacattttcattaatttgtacgctgacttcgccatcgctaaagcgacctacagcggcgtcgccgagactagtgtacaggcggttggcaatacgttgtgctagttccggggtggcgttaccagcaaaaagcttcatatcaggcacgagaagaacctcaggcatgcgtccattggtggaaagaatctgccgaaaactgtgcgggccaggcatgatcctttccaggcggtgtattaaagagcgcgatgcaacgtctggaacaaggtgacgttgtcaccgaaactcagcttgcccggcttaaagcatggctctgtgcaatggggaaagattagcgcctttcgccacaaagccattgagccattccggggcttgctctagcacctggcgggcttcagactctgtatcaaattcagcaaagacacaggcccctgtcccagtcaggcggctcggggcgtattctaacagccaggaaagcaccgcatcaacctcgcgaaaacgttttcttgcgataacctcgcaatcattgctgaattcacattttagcaacgtttctatactcctttttggcgtattgcgcgggagttcaggatctttaaaaatcaccggagtcggaatacttacaccagggtgcgccaccagataccacttctctggcggatccaccggcgttagtatttcaccaacgccttcggcaaacgcggcatgcccccgaacaaagacaggaacatctgcgcccagcgtcagccccatttccgccagctcatccatgcttagcccgcattgccagagatgatttaatgccaccaggaccgtcgcggcattggaactaccaccgccgagaccgccgcccatcggcaaacgcttgtcaatgctgatattcgcaccgcttcccgtcggaagacgcccgctgtctgccgcagttttcatcaacaatcgcgctgcgcgaacgatcaggttatcttcatgttccacgccttcaacgggcgttaacagacgaatatccccatcgtcacgaagctcaatgctgatggtgtcgccgtaatcaagaaactgaaacagcgtttgcagcgtgtggtaaccatccgcacgctgaccggtaatgtataaaaacagattaagttttgccggagagggccactgtgtccgcattatttcactatccagttatccatttttaacttgatgcgttgaccaccgtcggtgagttccatattggctggcatcgcaggttgcgttttggtgtcataaccaccataaacaaccttccagtttttgccattctggctgtaggtaatttcgctcaggcggtactggtcgtccagtttgtagtcggttgcatcacccggtaaacctaaaatccactggcgcaagctgttgagcggaattggcattccggtcaatttgccaatcatctcttcggcgtcatcggcggtataacgctgacctttattgtcgactaactgcacgttacccggttgagcattcagctccagttccgtgctgcccaatgggttagtgagcagcagacggtagcgatcctggccggtttgctgccagaaaaagcgggcgtacactttttgttggtcagaaatataagcgaacgcgccgcgagtctgatactgattaagattgcgcacgtcttgctgatgctgacgccattgtgggctatccgggcttttgccaggacctttgggcgtggtaacggaacaggcagtgagcacaagagcagccagcggtagcaggcggataagacgaaaatcgggcaggggcatagtgatgacaagtccttgagatacgttgcagttataacccttaatgctagcgttaccgtccgctatcgtctatgttcaagttgtcttaattgccagaatctaacggctttcggcaattactccaaaagggggcgctctcttttattgatcttacgcatcctgtatgatgcaagcagactaaccctatcaacgttggtattatttcccgcagacatgacccttttagcactcggtatcaaccataaaacggcacctgtaagcctgcgagaacgtgtaagctttagcccggataagctcgatcaggcgcttgacagcctgcttgcgcagccgatggtgcagggcggcgtggtgctgagcacgtgcaaccgcacggaactttatcttagcgttgaagagcaggacaacctgcaagaggcgttaatccgctggctttgcgattatcacaatcttaatgaagaagatctgcgtaaaagcctctactggcatcaggataacgacgcggttagccatttaatgcgtgttgccagcggcctggatagtctggttctgggggagccgcagatcctcggtcaggttaaaaaagcgtttgccgatagccaaaaaggtcatatgaaggccagcgaactggaacgcatgttccagaaatctttctctgtcgcgaaacgcgttcgcactgaaacagatatcggtgccagcgctgtgtctgtcgcttttgcggcttgtacgctggcgcggcagatctttgaaagcctctctacggtcacagtgttgctggtaggcgcgggcgaaactatcgagctggtggcgcgtcatctgcgcgaacacaaagtacagaagatgattatcgccaaccgcactcgcgaacgtgcccaaattctggcagatgaagtcggcgcggaagtgattgccctgagtgatatcgacgaacgtctgcgcgaagccgatatcatcatcagttccaccgccagcccgttaccgattatcgggaaaggcatggtggagcgcgcattaaaaagccgtcgcaaccaaccaatgctgttggtggatattgccgttccgcgcgatgttgagccggaagttggcaaactggcgaatgcttatctttatagcgttgatgatctgcaaagcatcattagccacaacctggcgcagcgtaaagccgcagcggttgaggcggaaactattgtcgctcaggaaaccagcgaatttatggcgtggctgcgagcacaaagcgccagcgaaaccattcgcgagtatcgcagccaggcagagcaagttcgcgatgagttaaccgccaaagcgttagcggcccttgagcagggcggcgacgcgcaagccattatgcaggatctggcatggaaactgactaaccgcttgatccatgcgccaacgaaaagtcttcaacaggccgcccgtgacggggataacgaacgcctgaatattctgcgcgacagcctcgggctggagtaacagtacatcattttctttttttacagggtggaggaggaataatggaatatcaacactggttacgtgaagcaataagccaacttcaggcgagcgaaagcccgcggcgtgatgctgaaatcctgctggagcatgttaccggcagagggcgtacttttattctcgcctttggtgaaacgcagctgactgacgaacaatgtcagcaacttgatgcgctactgacacgtcgtcgcgatggtgaacccattgctcatttaaccggggtgcgagaattctggagcttgccgttatttgttagcccagcgaccttaattccgcgcccggatacggagtgtctggtggagcaggcactggcgcggttgcctgaacaaccttgccgtattctcgatctcgggacgggtaccggggcgattgcgcttgcgctggctagcgagcgcccggactgcgaaattatcgctgtagatcgtatgcctgatgctgtctccctggcacaacgtaatgcccagcatctggcgatcaaaaatatccacattctgcaaagcgactggtttagcgcgctagccgggcagcagtttgcgatgattgtcagcaatccgccgtatattgacgagcaggaccctcatcttcaacaaggcgatgtccgctttgagccgctcactgcgctggttgcggcagacagtggaatggcagacatcgtgcatatcatcgaacagagccgtaacgcgctggtatccggcggctttctgcttctggaacatggctggcagcagggcgaagcggtgcgacaagcatttatcctcgcggggtatcatgacgtcgaaacctgccgtgactatggtgataacgagcgcgtaacgctcggccgctattatcaatgacaagtttttctacactgcttagtgttcatcttattagtatcgcgctttctgttgggctattaaccttacgtttctggctacgttatcagaagcatccacaggcatttgctcgctggacgcgcattgtgccgccggttgtcgatacgctgttactgttaagcggcattgcgttgatggctaaagcgcacatcctgccattttccgggcaggcacagtggctgactgaaaagctgtttggagttatcatttatatcgttttgggttttattgcactcgattatcgtcgtatgcacagtcagcaggcgcgcattattgccttcccgctggcgttggtggtgctgtacatcatcattaaactcgccaccacaaaagtaccgttactggggtaagtcatgagaagcttagctgatttcgaatttaataaagcgccattgtgcgaaggcatgatcctggcttgcgaagcaatccgccgcgattttcccagccaagatgtttacgacgaactggagcgtctcgttagtctggcgaaggaagaaatcagccagcttctgcctttagaagagcagttggaaaaactgatcgcgctgttttacggcgactggggatttaaagccagtcgcggtgtttatcgtctttccgatgcattatggctggaccaggtgttaaagaatcgacagggcagtgcggtaagtttaggtgcggttttattatgggtcgcgaatcgtctcgatttgccgctgctgccggtgattttccctacgcagctgatattgcgcattgaatgtccggatggcgaaatttggctgattaatccttttaacggtgaaagcttaagcgaacatatgctggacgtatggttaaagggaaatatcagcccgagcgcggaactgttttatgaagaccttgatgaagctgataacattgaggtaatccgcaaattgctggatacactcaaagccagcttgatggaagaaaatcagatggagctggcgttacgcaccagcgaagctttattacaattcaaccctgaagatccctatgaaattcgcgatcgcgggttgatttatgcgcaactggattgcgaacacgttgcgttgaacgatttaagttatttcgttgaacagtgtccggaagacccgatcagcgaaatgatccgtgcgcaaataaataacatcgcgcataaacatattgtgctgcattaattaatcgacattttactcaagattaaggcgatcctatgaaacaaaaagtggttagcattggcgacatcaacgtagcaaatgacctgccgttcgtactgtttggcggtatgaacgtgttggaatctcgcgatctggcgatgcgcatttgcgagcactacgtaactgtgacccagaaactgggtatcccttacgtgttcaaagcctcttttgacaaagccaaccgctcctccatccactcttatcgtggaccgggcctggaagaagggatgaaaatcttccaggagttgaagcagacttttggcgtgaaaattatcaccgacgttcacgaaccaagtcaggcacagcccgttgctgatgtcgtggatgtgattcagttgccggcgtttcttgctcgccagactgacctggttgaagccatggcgaaaaccggtgcggtaattaacgtcaagaaaccacagtttgtcagcccgggacagatgggtaatatcgttgataaattcaaagaaggcggcaacgaaaaagtgattctttgcgatcgcggtgctaacttcggctatgacaacctggttgtcgatatgctgggcttcagcattatgaagaaagtgtctggtaacagcccggtgattttcgacgtgacccacgcactgcaatgccgcgatccgtttggcgcagcttccggtggtcgtcgtgctcaggtggctgagctggcacgagccggtatggcggtaggtctggcggggctgtttattgaagcgcatccggatccggaacatgcgaaatgtgatggtccatccgcgctgccgctggctaaactggaaccgttcctcaagcagatgaaagcgattgatgatctggtgaaaggtttcgaagaactggataccagcaagtaatcttttttgcttgaaaaataaagtattagcgttctgcgttaagacttttttcatgggtgccggatacaaaaaaggccgcaggctgttacccctgcggccggtttcgggcgcatattgccatcacggcagcctgacgcccgttttcaccttacttccggttacgccaccagctgacaatcgctgcggtaataattcccgccaggatcggtgctgccaggtcgtgccagaaaatcatggcaaactgcgcgagcgtcatatagccgccttgttgtaatgacaacattttgcggctattcttgaattgttctggttcaagattagcccccgttctgttgtcaggttgtacctctcaacgtgcgggggttttctctttccagcaaccaatgccaccagggataaagcccccgcaacattgcgcctcaccggataacgccggcttggtgtggatactacgactcaattcatcttcacttcatccctgaaatgtttgcaatgaagagtgcattccggtttttcaacagctgttacagtcatttcatgagtgctctggatgaggcttccagctcgggttgccaatatttacttgtggaagtgataaagacaaaaatggccgcaggctgttacccctgcggccggtttcgggcgcatattgccatcacggcagcctgacgcccgttttcaccttacttccggttacgccaccagccgacaatcgctgcggtaataattcccgccaggatcggtgccgccaggtcgtgccagaaagtcatggcaaactgcgcgagcgtcatatagccgccttgttgtaatgacaacattttgcggctattcttgaagtgtctggtttcaagattagcccccgttctgttgtcaggttttacctctcaacgtgcgggggttttctctttccagcaaccaatgccaccagggataaagcccccgcaacattgcgcctcaccggataattccggcttggtgtggatactacgtctcaattcatcttcacttcatccctgaaatgtttgcaataaagagtacattccggcttttcaacagctgttgcagtcgtttcatgagtgctctggatgatgcttccagctcgggttgccaatatttacttgtggaagagataaagacaaaaatggccgcaggctgttacccctgcggccggtttcgggcgcatattgccatcacggcagcctgacgcccgttttcaccttacttccggttacgccaccagctgacaatcgctgcggtaataattcccgccaggatcggtgctgccaggtcgtgccagaaaatcatggcaaactgcgcgagcgtcatatagccgccttgttgtaatgacaacattttgcggctattcttgaagtgtctggtttcaagattagcccccgttttgttgtcaggttttacctctcaacgtgcgggggttttctctttccagcaaccaatgccaccagggataaagccccgcaacattgcgcctcaccggataacgccggcttggtgtggatactacgtcgcaattcatcttcacttcatccctgaaatgtttgcaatgaagagtacattccggcttttcaacagctgttgcagtggtttcgtgcagggtgtggtacaggctcgcaattctgattaacgacctgtccaggtagtatgaagaaatacaataagcaggaatttatattatctcccccgattaccgtcatcggaggagatataactgtcaggcaaatatcgtcatcaaataggcggcaaacagtgccagatgcgctgcgccattgagcatgttagtacgtccggtggagaaggagatatggcacagcactaaagaggccaccatcaccaccatttctggcgcaccaagtgcaaactgcaattcgttacccgtcataaaggcaattagcgtgacgacaggtacggtaaggctaatggttgctaacacactaccaaagaacagattcatcgcgcgctgaacctggttgttcaacactgcttttaatgcacctaaaccttccgggctcagaatcaacagtgccaccaggaagccagtaaaggcgacaggggcattcatgctgtcgagcaatgtctccaggctgctggcgttcattttggtcaccgcaataacggcaatcagatggataatcaaccagatagcatgccacaggctgctatgggcagacggtttaccgtgatgcgggtcgtcatcatcactgtcatcttcgtgctcgtagacaaacaaactttgatgcgttttggtctggatcagcaaaaatacgccatacattgccgcagaaattaatgctaccagtaacgcctgaccggtactaaaattcgccgcaggcagagccattggaaataccagtacgattatcgccagggggaacagcgcaattaaatactgcttgataccaaacagattcatatattgggtggcaaacttacgaccgcccaacaataaactaaagccaaccagcccaccggtaacaatcataatgatactatagagcgtatcacgcattagcgttggcgcggcgtcgccggttgccattaaagcactaatcaaactgacttcaagaataaccacactaaggctaagaataaggctaccgtaaggttctcccaggcgatgggctaatacgtccgcatgacggacaacactaaaggcgctacttaaaataccaataagcgcaagaagattgatggcaatgaccactggtagtgtctggctgcttccccacaggaacagcactaccagcgccagaaccgggaaaataaggctagtctccttgtggcgggtttttaccgcctcttgagcattactcattatggttatccctttgcagatgaatttatcgaaaatgtaaaaaataggtaggaaaaataacagaaagtgtctggatatcggtaacattttacgaatttttaccccgctgtcgattttttactcattggggcataaaaataagtattacgtttagacaatgtttgttttagcgtctcttaagaagagtctgacctgaaaattcttatgttttggcaagagtagatattgttgaccacacttaatgttcaactttgtaaaaggagtcaacgatgccgtataaaacgaaaagcgatctgccggaaagcgtaaagcacgttctaccgtctcatgcccaggatatctataaagaagcgttcaacagcgcatgggatcaatataaagataaagaagatcggcgtgatgacgccagtcgcgaagaaaccgcgcataaagtggcctgggctgctgtgaagcatgaatatgccaaaggggatgatgataaatggcataaaaaaagctaaaaccggtcgcttagttaaagctattcgtgcggtgttgccttgcaagtggtccgtggattgcatattgtcccgttagtggtttcaaaatgagcagtaaaaatgtccggaagacaccaaaaagttgtcgcagggaagtatgcagtggcggaagtgtaaggtgataacgcgtgatttcttgatgaatgccgattgtaaaacggcatttggtgccattgaagaaagtctcttatggagtgcagaacaacgggcggctagcctggcggcgacgctggcttgtcgacctgatgagggaccggtgtggatcttcggctatggaagcttgatgtggaatccggcactggagtttaccgaaagctgcaccggtacactggttggatggcatcgcgcattttgcctgcgcctgaccgccgggcgcgggactgcgcaccagccgggacggatgcttgcactgaaagagggcggacgcaccacaggcgtcgcctatcgactgccagaagagacgctggagcaggaactaaccctgttgtggaagcgagagatgattaccggctgttatctgccaacctggtgtcagcttgatcttgatgatggacgcacagtaaacgccattgtgtttattatggacccgcgacatccagaatatgaatctgatactcgcgctcaggtcatcgcgccgttgattgcggcggcgagcggtccgctgggaaccaacgcacaatacctgtttagtctggaacaggagcttatcaaactgggaatgcaggacgatgggctgaatgatttgctggtaagcgtaaaaaaactgctggcggagaattttccggatggtgtgttacgtccgggattcgcctgagtaaacttcccgcatagtggggcgtcagacgccccctcaaacattaaaatgtgagcactttatcggcactcagcgtccattgcgccagttccacaagagtaccgatttccaccccatcaatcagaggaagtgtactaatcccgcgcccgtcggtacaggttttgcacaatttcaccggtacattctgagcggtaaggatctccagcatttgctgaatgttgtagccttcccctggtttttgcccgcgcaacccggctgtgaccgcatcagacatgaggaacagacgcagatccagattgctctcctgctctcgtaacgcaatggccagccgcaagctgttaaacaaggattcgctcccgtaaggtgcgccattggcaacgatcacgattttttgcattatttactcctgtattcagggaattagacactcatcttctatcttactgcttctgcagcgtctgaccaatcggtcacatttttaaggattttcctgaaagcgcgagaaaatacgacaaaagttgccagtaatcgttattctttaaggctatggtttttcattattaccggaagttaccgacgttttgagccgtttcgttcctcgcattatcccgttttatttactcttgcttgtagcaggcggtacagctaacgcacaatctaccttcgagcaaaaagcggcaaatccctttgataataacaatgatggtctgccggatttaggcatggctcccgaaaatcatgatggggaaaaacactttgctgaaattgtgaaagatttcggcgaaaccagtatgaatgataacgggctggatactggcgagcaggcaaaagctttcgcattgggaaaagtccgcgacgcgcttagtcaacaggttaatcagcacgtagagtcctggctaagtccgtggggaaatgccagtgttgacgtcaaagtggataacgaaggacatttcaccggcagtcgtggaagctggtttgtgccgttacaagataatgatcgttatctcacctggagccagcttggtcttactcagcaggataatgggttggtgagcaatgtgggcgttgggcaacgctgggcgcgcggcaactggctggtgggttataacactttttatgacaacttgctggacgaaaatcttcagcgagcgggctttggtgccgaagcgtggggcgaatatttgcgattaagcacaaacttttatcagccgtttgctgcatggcatgaacagacagccacgcaggaacaacggatggcgcgcgggtacgacctgacagctcggatgcgcatgccgttctatcaacacctcaataccagtgtcagcctagaacagtattttggtgatcgtgttgatttgtttaactctggtacgggttatcacaatcccgtcgcgttgagtctgggattaaattacacccctgtgccattagtcactgtgacggcccagcataaacagggtgaaagtggcgaaaatcaaaataacctcgggctgaatcttaattaccgctttggtgtaccgctcaaaaaacaactttctgcgggcgaggttgccgaaagtcagagcttacgtggtagtcgctatgacaatccgcagcgaaataatctaccgactcttgagtaccgacagcgaaaaacgttaacggtgtttctggcgacaccgccgtgggatctaaaacctggcgaaacagtgccgctgaaattacaaatccgcagtcgttacggtattcggcaactgatttggcagggcgatacgcagatattaagtttgacgccgggcgcacaagccaacagcgcggagggctggacgctgatcatgcctgactggcagaacggggaaggggcaagcaatcactggcgattgtctgtggtggtggaagataaccaggggcagcgtgtctcctccaatgagatcacgctaacgcttgtcgaaccgttcgatgcattgagtaacgacgaactgcgctgggaaccgtaatcagaaaatgcgctcctgatgcacccataccgctgcttccacgcgagacttgagcttcattttcttcagcatgtgcttgacgtgcacttttactgtgctttcggtgatatccaggcggcgggcaatcatcttgttcggcaaaccctgggcaatcagcttgagaatatcgcgctcgcgtggggttaactggttaacatcgcgctcagtagtggcacggttagcgcgcaagctggcggccagaacaggcgttaatgcttcgcttaataccatttcgccagcagctgcctgatgcaatgctttcagcagatcttccggttccatatcttttaacagatagccatccgcgccgcgtttcagtgcggtgaccacatcttcttcatggttagagacgctgaataccacaatgcgcccactgagggacttttcgcgcagtttatccagcgtttccagaccgttcatgccgggcatattgagatctaacaggatcagatcgggatcaagagactccgccagttcaataccctgttcgccattactcgcttcgccaaccacggtgatatctggtgccatactgataagctgttttacgccagttcgcagcatcgggtgatcgtcaatcagcaggatagtagccggttcctgattactcatgggtatctccttggacgtctgtgaaagttttttcgggaataaaggtgaccaccacttcggtgccaccactttcacgacggcggacgcggcaatcgcctcgtaaactttgcgcacgatcgcgcattattatcatgccgtagtgattgctgcggatggcattttcaggcacgccgcagccgttatcctggacggtcagtttgacctgattatcgttttgcgccaccgtcaccacgacttcactcgcttggctatgtttgagggcgttacttaatgcctcacgggcaatttgcaacaagtggattgcctgatggctaggcaccaggcgaggcggcaattgataatccagcttcaccgggaagccaaatttggcgctgtactcttcgcaactcgcctccagcgccggacgtaatccaggctcggtgagctgcaagcggaatgtggtgagcaattcacgcaactgcgcccaggatgcattcagttcgttacggatctgacttaacagttcgcggctgctttctggcagcgcatcgccctgcatctgtaaacaactcacctgcatcttcatgcaagagagagattgggcaatagaatcatgcagttcgcgcgcaatggtggcacgctcttccatcacgatcaactgttgctgacgttcctgatggcgatccagcgccagcgtggcggtgagttgttcaaccagggtatccaccagttgttgttgatcatggctaagatgacgcccctgcggcagggtcgccagcaaaataccgtactgcgtatgagagtcagccagccgccacttcagggtcgtgccgcgatcaccaacgggtaatacgccgcgcgggcagagctggcagcctttatcatcacaagtcatatctggctggcaggtaaactcctgatgattctcttcatcatcagtgtcatacacccgcaattcgatatcacgtagcagggttaaattctgtaagccgttgagtacaggactcaggcgttcacacagcggggcgcgggaatgcaaacggcggttagcctgccataaaaaagagaggatctgatttttatgctccagcccggcggttttctcctgaacccgctgctcaagtacggcataactttcggccagttctgcagacatattgttcaacgcagttccaagcatcgccatttcgttgcgcccgctgatgtttgcgcgttgggtaaaatcgcgatgactgacggcactcgccattgccagcagttgccgccacggttgtagcagtcgcgcccgcaaccagataatagtgaacaccagtaaaagtgccataaataccgccattacccgatggaccagtaccactgtctcgatgcgcatttccgtggtgcggtcaaaaccagataccagttgatcaagcccggcaacaaactggctgacatccgcactcaccgtttctcggttttgtgcacgcatcagcgcagggatcagttcattacgccagtaatcttgtaaaccctgtaattgcgccagttgtccgtctcgttctgctgctcgagtcaactcggcgctaaatgccgtttgttccatctctttaattaagggcttgtctttctcgcttaatggcactgccgccaacagacggtaactttgcatgcgcaggcttcccgctttgttgatcgcatgggcgctgccctgaacgccttgcaccagccagccagaaaccgccatccctgccagtccaatagcagtagaaagcaacacaataagcgcaacctgattaaccagggtgagcggagagagacaacgtttaagcatgtaaacctcttccttcaggctttaaatgagcaataaccttaatgaatgtgacgatacattctggaatggcagtattctcggctattggctgaagtatacccatacccggaaagagttactccttatttgccgtgtggttagtcgctttacatcggtaagggtagggattttacagcaccgtgaaaaatctcataatttttatgaagtcactgtactcactatgggtaatgataaatatcaatgatagataaagttatcttatcgtttgatttacatcaaattgcctttagctacagacactaaggtggcagacatcgaaacgagtatcagaggtgtctatgagtcacagttccgcccccgaaagggctactggagctgtcattacagattggcgaccggaagatcctgcgttctggcaacaacgcggtcaacgtattgccagccgcaacctgtggatttccgttccctgtctgctgctggcgttttgcgtatggatgttgttcagcgctgttgcggtgaacctaccgaaagtcggctttaattttacgaccgatcagctatttatgttgactgcgctgcctagcgtttctggcgcgttattacgtgttccatactcctttatggttcctatcttcggtggtcgtcgctggacggcgttcagcaccggtattctgattattccttgcgtctggctgggttttgccgtgcaggatacctccacgccttatagcgtcttcatcatcatctctctgctatgcggctttgctggcgcgaacttcgcatccagtatggcaaacatcagcttcttctttccgaaacagaagcagggtggcgcgctgggtctgaatggtggtctgggaaacatgggcgtcagcgtcatgcagttggttgctccgctggtggtaagtctgagcattttcgcagtatttggtagccagggcgtcaaacagccggatgggactgagctgtatctggcgaatgcgtcctggatatgggtgccgttccttgccatcttcaccattgcggcgtggtttggcatgaacgatcttgctaccagcaaagcctccatcaaggagcagttgccggtactcaaacggggtcatctgtggattatgagcctgctgtatctggcaaccttcggctccttcatcggcttctccgcgggctttgcaatgctgagtaaaacgcagttcccggatgttcagattctgcaatacgctttcttcgggccgtttattggtgcgctggcgcgttctgcaggtggtgcattatctgaccgtctgggcggaactcgtgtcacgctggtgaactttattctgatggcgattttcagcggcctgctgttcctgaccttaccgactgacgggcagggcggaagcttcatggcgttcttcgcggtcttcctggcgctgttcctgacagctgggctgggtagtggttccactttccagatgattagtgtgatcttccgtaaactgacaatggatcgcgtgaaagcagaagggggttctgacgaacgtgcgatgcgtgaagcggcaaccgacacggcggcggcgctgggtttcatctctgcgattggcgcgattggtggcttctttatcccgaaagcgtttggtagcagcctggcattaacgggtagcccagtcggcgcaatgaaggtatttttgattttctatatcgcctgcgtagtgattacctgggcggtatatggtcggcattctaaaaaataaaccgttactcgtcatacttcgggttacatgtgctgcggctgcgttcattcaccccagtcacttactttagtaagctcctgggattcattcacttgccgccttcctgtaaaccgaattatatagagtaaaatatttgattatcctttgcgcggcatgatgtcgcgctttttttatgcgtcatttagttacaacatactaatgttatatggtttatttcgccggatttcattaagagccattaatatgttacccatggggaatactccttaatacccatctgcataaaaatcttaatagtttaaataactacaggtataaaacgtcttaatttacagtctgttatgtggtggctgttaattatcctaaaggggtatcttaggaatttactttatttttcatccccatcactcttgatcgttatcaattcccacgctgtttcagagcgttaccttgcccttaaacattagcaatgtcgatttatcagagggccgacaggctcccacaggagaaaaccgatgagtaaattcctggaccggtttcgctacttcaaacagaagggtgaaacctttgccgatgggcatggccagcttctcaataccaaccgtgactgggaggatggatatcgccagcgttggcagcatgacaaaatcgtccgctctacccacggggtaaactgcaccggctcctgcagctggaaaatctacgtcaaaaacggtctggtcacctgggaaacccagcagactgactatccgcgtacccgtccggatctgccaaaccatgaacctcgcggctgcccgcgcggtgccagctactcctggtatctttacagtgccaaccgcctgaaatacccgatgatgcgcaaacgcctgatgaaaatgtggcgtgaagcgaaggcgctgcatagcgatccggttgaggcatgggcttctatcattgaagacgccgataaagcgaaaagctttaagcaggcgcgtggacgcggtggatttgttcgttcttcctggcaggaggtgaacgaactgatcgccgcatctaacgtttacaccatcaaaaactacggcccggaccgtgttgctggtttcagcccaattccggcaatgagcatggtttcttacgcaagcggtgcacgctatctcagcctgattggcggtacttgcttaagcttctacgactggtactgcgacttgcctcctgcgtctccgcaaacctggggcgagcaaactgacgtaccggaatctgctgactggtacaactccagctacatcatcgcctgggggagtaacgtgccgcagacgcgtaccccggatgctcacttctttactgaagtgcgttacaaagggaccaaaactgttgccgtcacaccagactacgctgaaatcgccaaactgtgcgatctgtggctggcaccgaaacagggcaccgatgcggcaatggcgctggcgatgggccacgtaatgctgcgtgaattccacctcgacaacccaagccagtatttcaccgactatgtgcgtcgctacaccgacatgccgatgctggtgatgctggaagaacgcgacggttactacgctgcaggtcgtatgctgcgcgctgctgatctggttgatgcgctgggccaggaaaacaatccggaatggaaaactgtcgcctttaataccaatggcgaaatggttgcgccgaacggttctattggcttccgctggggcgagaagggcaaatggaatcttgagcagcgcgacggcaaaactggcgaagaaaccgagctgcaactgagcctgctgggtagccaggatgagatcgctgaggtaggcttcccgtactttggtggcgacggcacggaacacttcaacaaagtggaactggaaaacgtgctgctgcacaaactgccggtgaaacgcctgcaactggctgatggcagcaccgccctggtgaccaccgtttatgatctgacgctggcaaactacggtctggaacgtggcctgaacgacgttaactgtgcaaccagctatgacgatgtgaaagcttataccccggcctgggccgagcagattaccggcgtttctcgcagccagattattcgcatcgcccgtgaatttgccgataacgctgataaaacgcacggtcgtagcatgattatcgtcggtgcggggctgaaccactggtatcacctcgatatgaactatcgtggtctgatcaacatgctgattttctgcggctgtgtcggtcagagcgggggcggctgggcgcactatgtaggtcaggaaaaactgcgtccgcaaaccggctggcagccgctggcgtttgcccttgactggcagcgtccggcgcgtcacatgaacagcacttcttatttctataaccactccagccagtggcgttatgaaaccgtcacggcggaagagttgctgagtccgatggcggacaaatcccgctataccggacacttgatcgactttaacgtccgtgcggaacgcatgggctggctgccgtctgcaccgcagttaggcactaacccgctgactatcgctggcgaagcggaaaaagccgggatgaatccggtggactatacggtgaaatccctgaaagagggttccatccgttttgcggcagaacaaccagaaaacggtaaaaaccacccgcgcaacctgttcatctggcgttctaacctgctcggttcttccggtaaaggtcatgagtttatgctcaagtacctgctggggacggagcacggtatccagggtaaagatctggggcaacagggcggcgtgaagccggaagaagtggactggcaggacaatggtctggaaggcaagctggatctggtggttacgctggacttccgtctgagcagcacctgtctctattccgacatcattttgccgacggcgacctggtacgaaaaagacgacatgaatactagcgatatgcatccgtttattcacccgctgtctgcggcggtcgatccggcctgggaagcgaaaagcgactgggaaatctacaaagccatcgcgaagaaattctccgaagtgtgcgtcggccatctgggtaaagaaaccgacatcgtcacgctgcctatccagcatgactctgccgctgaactggcgcagccgctggatgtgaaagactggaaaaaaggcgagtgcgacctgatcccaggtaaaaccgcgccacacattatggtcgtagagcgcgattatccggcgacttacgaacgctttacctctatcggcccgctgatggagaaaatcggtaatggcggtaaagggattgcctggaacacccagagcgagatggatctgctgcgtaagctcaactacaccaaagcggaaggtccggcgaaaggccagccgatgctgaacaccgcaattgatgcggcagagatgatcctgacactggcaccggaaaccaacggtcaggtagccgtgaaagcctgggctgccctgagcgaatttaccggtcgtgaccatacgcatctggcgctgaataaagaagacgagaagatccgcttccgcgatattcaggcacagccgcgcaaaattatctccagcccgacctggtctggtctggaagatgaacacgtttcttacaacgccggttacaccaacgttcacgagctgatcccatggcgtacgctctctggtcgtcagcaactgtatcaggatcaccagtggatgcgtgatttcggtgaaagcctgctggtttatcgtccgccgatcgacacccgtagcgtgaaagaagtgataggccagaaatccaacggcaaccaggaaaaagcgctcaacttcctgacgccgcaccagaagtggggtatccactccacctacagcgacaacctgctgatgctgactttaggtcgcggtggtccggtggtctggttgagtgaagccgatgccaaagatctgggtatcgccgataacgactggattgaagtcttcaacagcaacggtgctctgactgcccgtgcggttgtcagccagcgtgttccggcagggatgaccatgatgtaccacgcgcaggaacgtatcgttaacctgcctggtagcgaaattacccaacagcgtggtggtatccataacagcgtcacccgtatcacgccgaaaccgacgcatatgatcggcggctatgcccatctggcatacggctttaactactatggcaccgtaggttctaaccgcgatgagtttgttgtagtgcgtaagatgaagaacattgactggttagatggcgaaggcaatgaccaggtacaggagagcgtaaaatgaaaattcgtagtcaagtcggcatggtgctgaatctcgataagtgcatcggctgccacacctgtagtgttacctgtaaaaacgtctggaccagccgtgaaggcgtggaatatgcgtggttcaacaacgtggaaaccaagccgggccagggcttcccgactgactgggaaaaccaggaaaaatacaaaggcggctggatccgtaaaatcaacggcaaactgcagccgcgcatgggtaaccgtgccatgctgctgggtaaaatcttcgctaacccgcatctgccggggatcgacgattattacgagccgttcgattttgactatcagaacctgcataccgcgccggaaggcagcaaaagccagccgattgcccgtccgcgtagcctgattaccggggaacggatggcgaaaatcgaaaaagggccgaactgggaagatgacctgggcggtgagtttgacaaactggcgaaagacaagaacttcgacaacatccagaaggcgatgtatagccagttcgaaaacaccttcatgatgtatttgccgcgcctgtgcgaacactgcctgaacccggcatgtgtggcgacctgcccgagcggtgcgatttacaagcgtgaagaagatggcatcgtcctgatcgaccaggataaatgccgtggctggcgtatgtgcatcactggatgcccgtacaaaaaaatctacttcaactggaagagcggtaagtctgagaagtgcatcttctgctatccgcgtattgaagcgggtcagccgaccgtgtgcagtgaaacctgtgtcggtcgtatccgttatcttggcgtgctgttgtacgatgccgacgctattgaacgtgcagccagcaccgagaacgagaaagatctttaccagcgtcagctggacgtgttcctcgatccgaacgatccgaaagtcatcgagcaggcgattaaagacggtattccgctgagcgttattgaagccgcacagcagagcccggtttataaaatggcaatggaatggaaactggcgctgccgctgcatccggaatatcgcacactgccgatggtctggtacgtgccgcctctgtctccgattcagtctgcagcagacgcgggtgagctgggtagcaacggcattctgccagacgtcgaaagcctgcgtattccggtacagtatctggcgaatctgctgaccgccggtgataccaaaccggtactgcgcgcactgaaacgtatgctggcgatgcgtcattacaaacgtgctgaaaccgttgacggtaaagttgatacccgtgcgctggaagaggtcggtctgaccgaagcccaggcacaggagatgtaccgttatctggcgattgctaactacgaagatcgctttgtggtgccgagtagtcatcgtgaactggcacgggaagccttcccggagaaaaatggctgcggctttacctttggtgatggctgccacggtagtgataccaaattcaatctgttcaacagccgtcgtatcgatgccatcgatgtgaccagcaaaacggagccgcatccatgatcgaactcgtgattgtaagccgtctccttgaatatccggatgctgccttatggcagcatcaacaagagatgtttgaggcgattgccgcgagcaaaaatctgccaaaagaggatgcccatgcgctgggcattttcctgcgcgatttaacgacgatggatccgctcgatgcccaggcgcagtacagcgaactgttcgaccgtggccgcgccacgagtctgttgctgtttgaacatgtgcacggcgaatcccgcgaccgcggccaggcgatggtggacctgctggcgcagtacgagcagcacggcttgcagttaaacagccgcgaattgccggaccatctgccgctgtatctggagtacctggcgcagctgccgcaaagcgaagccgtggaaggtttgaaagatatcgcgccgattctggcattgctgagcgcgcgtctgcaacagcgtgaaagccgttatgccgtgctgtttgatctgctgctgaaactggcgaataccgctatcgacagcgacaaagtggcggaaaaaattgccgacgaagcgcgcgatgatacgccgcaggcgctggatgctgtctgggaagaagagcaggttaaattctttgctgacaaaggctgcggtgatagtgcaatcactgcgcatcagcgtcgctttgccggtgccgtcgcgccgcaatatctgaatatcaccaccggaggacagcactaatgcaattcctgaatatgttcttctttgatatctacccgtacatagccggggcggtcttcctgattggtagctggctgcgttatgactacgggcagtacacctggcgcgcggcgtccagccagatgctggatcgcaaagggatgaacctggcgagcaacctgttccatatcgggattctggggatttttgtcggtcacttcttcggtatgctgacgccgcactggatgtatgaagcctggctgccgattgaagtgaaacagaaaatggcaatgtttgctggtggtgccagcggcgtgctgtgtctgattggcggcgtgctgttgctgaaacgtcgtctgttcagcccacgcgtgcgtgcaaccactaccggagcggatatcctgatcctgagcctgctcgttatccagtgcgcgctgggcctgttgaccattccgttctccgctcagcatatggacggtagcgagatgatgaaactggttggctgggcgcagagcgtggtgaccttccacggtggcgcttctcaacacctcgatggtgtggcgtttatcttccgtctgcacctggtgctggggatgacgttattcctgctgttcccgttcagccgtctgatacacatctggagcgtaccggtggagtatctgacacgtaagtaccagctggtgcgcgctcgtcactaagcgaattttagttcacatagaccctgcttcggcggggtttttttatgggcacggtgcggggtgagttgtcggatgcgcttcgcttatccgacctacaggggaggatattgtaggcccggtaaacgtggtgccatcgggcaaaattagctcggagtaacaggttttgattatttaaggaagcgatggtggtgggggaaggattactcagcgctgcgcgcttcgcccttcgggtcgttgcctgcggcaacgctctcagcctggcgctcaagagcaaccttggtcgaagcttcagttccttccccgcttgggcagaatatttgattgcggatagctttgagaattccggggcttttgaaagtgatggtggtgggggaaggattactcagcgctgcgcgcttcgccctagcggtcgttgcctgcggcaacgctctctcgctgacgctcgagccgaaccttaatcgaagcttctcatccttccccgcatgggcagaatatttgattgcggattcgcttgagagttcagggacttttgaaagtgatggtggtgggggaaggattactcagcgctgcgcgcttcgcccttcgggtcgttgcctgcggcaacgctctctcgctggcgctcgagtgctaccttggtcgaagcttctcatccttccccgcatgggcagaatatttaattgcggattcgttgggaagttcagggacttttgaaagtgatggtggtgggggaaggattcgaaccttcgaagtcgatgacggcagatttacagtctgctccctttggccgctcgggaaccccaccaggggtaattcaaattttgaggtaatgcttgagatggtggtgggggaaggattattcgtcgcttcgctcctcacccttcgggccgttgcctgtggcaacgttctctcgctttcgctcgaatcgaaccttagtcgaaggttctcacccttccccgatgagtgcaaactttcacaatctcaccgaagttaccacatcgctgtggtgaattatggtggtgggggaaggattcgaaccttcgaagtcgatgacggcagatttacagtctgctccctttggccgctcgggaaccccaccacggggtaatgctttttactggcctgctcccttatcgggaagcggggcgcatcatatcaaatgacgcgccgctgtaaagtgttacgttgagaaaaatgaactggttgcgtaattttcatccgtaacggattaaaggtaaccagttatttttgctggcgattaaagaataatcgttcgattaccgtaaacaaagacgcgctgtgccagtactttgtatagtgcacgacttaagacgtttttctcgacgtcacgacctgcgcgcatcatatcttcagctgtgtaggtatgatcgacatgaataacgtcctgcatgatgattgggccttcgtccagattgtcattcacatagtgagcggttgcgccaataatcttcacaccacgttcataggcctggtgataaggacgtgcgccaataaacgctggcaggaaactatggtgaatattgatgatcttattcgggaagcgtgccacaaattccggcgttaatacccgcatatacttcgccagcaccacgtagtcaggttgataagcatcaatggcatccgccatcttttgatcgtgctcgttgcgggttaacccttcatggcttaccagctcaaacggaatatcaaaacgctcaaccagagaacgtaaagtatcgtggttaccaataactgccgcgatttcgacatccaggccgccgtaattggctttcatcaacaaatcgccaaggcaatgcgcttctttagtgaccagaatcactatccggcgacgaccggcaggattcagctcacgcacggagccttctggcaatgcgctatcgagatccgccagcagggtggaatcattaaaaatcccttccagttccgtgcgcataaaaaagcgcccggtacggtgatcaacaaattcattgttctgtacgatatttaactcgtgcttgtagcaaatattggtaatacgtgcgatcagacctttttggtccggacaaatagtacgcagaactttacgttggagactatgcattgctggaaaaaccttgttgagagtgtttgctaaaccgtaccgtcaaccattattggccgcagcactttttaaattttttaccactaccacaagggcagggatcgttgcgaccaaactgcggacgtgtaccgtcaatatagtaccattgaccgttttctttcaaaaatcggctacgttcaattattgcacctgttttaccaccttcggtaaatcgagcaacaaaactgacaaatccgatattgtcggcgtcctgccaacaatgttcaaatacggtcaatcccaaccattcagtatgcgcaaatccggccatcaattcggcacgtaacgccgctgctccacaagagggatgccaggtctttattaaataatctgcgtcttgcatcacaaaagcgcagtaacggctacgcatgagatgttctggatcaggtgcaaccttttcaccagacacataagggtggcaacataggctatactcgacagcactaccacagggacaaagctgagacacaaataatctccctggaaacaataacggcgtattaaccgcctgagtagcactatgttaaccgagcagtagcgatgtggctacgattgcattccaggggaatcttgcgggaataatgagaaagataaaaatagggctggcgctgggatctggcgcggcgagaggttggagccatattggcgttattaatgcgctaaaaaaagtgggtattgaaattgatatcgttgcaggatgtagtattggtagcctggtgggcgctgcctatgcatgcgatcgattatctgcgctggaagattgggtgacctctttcagttattgggatgttttacgcctgatggatctctcctggcagcgcggtgggttactgcgcggcgagcgtgtcttcaatcaataccgcgaaataatgccggaaacagagatcgaaaattgttcccgtcgctttgcggctgttgccaccaatttaagtacgggacgtgaattatggtttactgaaggcgatctccatcttgctattcgcgcaagttgcagtattccaggactcatggcacctgttgcacataacggctactggctggttgatggagcagtcgttaacccaattcctatttccctcacgcgtgcattgggggctgatattgtgatagcggttgacctgcagcacgatgctcatttgatgcaacaagatttgctctcctttaatgtcagtgaagaaaatagcgagaatggtgattctctgccgtggcatgcgcgtctgaaagaaaggttaggcagcataacgacacgtcgggcggtgacagcgccaacggcaacagagattatgaccacttctatccaggtgctggagaaccgccttaaaaggaaccgcatggcaggtgatccgcccgatattctgattcaacctgtttgcccgcaaatatctacgcttgatttccatcgcgcgcacgctgccattgcggccggacagctggcagtggaaaggaaaatggacgaacttttgccgttggtacgcaccaacatttgaccagaatttttatctacacttaagttaattctgacaggcgcaggtggcaatagcatgccactattgagtaaagccagtcaggggagagaacatgacgcagccattggtcggaaaacagattctcattgttgaagatgagcaggtatttcgcagccttctggatagttggttttccagtttgggagcgacaacggtactggcggctgatggggtggatgcccttgagttgctgggaggtttcactccagacctgatgatatgtgatatcgcgatgccacgaatgaacgggcttaaactgctggagcatatacgtaacagaggcgaccagaccccagttctggtgatatctgccactgaaaatatggcagatattgccaaagcgttacgtctgggcgttgaagatgttttgctgaaaccagttaaagatctgaatcgcttgcgcgagatggtttttgcctgtctctatcccagcatgtttaatagccgcgttgaggaagaggaaaggctttttcgcgactgggatgcaatggttgataaccctgccgcagcggcgaaattattacaggaactacaaccgccggttcagcaggtgatttcccattgccgggttaattatcgtcaattggttgccgcggacaaacccggcctggtgcttgatattgccgcacttagcgaaaacgatctggcattttattgccttgatgtcacccgagctggacataatggcgtacttgctgccttgttattacgcgcattgtttaacggattattacaggaacagcttgcacaccaaaatcaacggttgccagagttgggcgcgttattgaagcaggtaaaccatttacttcgtcaggccaatctgccggggcagtttccgctattagttggctattatcatcgcgaactgaaaaatctcattctggtttctgcgggtctgaatgcgacgttaaataccggcgaacaccaggtgcaaatcagtaatggtgttccgttaggcactttaggtaacgcttatttgaatcaattgagccagcgatgcgatgcctggcaatgccaaatatggggaaccggtggtcgactgcgcttgatgttgtctgcagaatgagcaaacgataacgcgggctaaatttgcattacctgctaatgtcggctggtggtactatcgtcgccattcgtataagtaattgtcttaattatgctaactcgcctccttttcagaacttagccccttcggggtgctgatatactgggatgcgatacagaaatatgaacacgttcaaaacacgaacagtccaggagaatttaaatggctgccattaatacgaaagtcaaaaaagccgttatccccgttgcgggattaggaaccaggatgttgccggcgacgaaagccatcccgaaagagatgctgccacttgtcgataagccattaattcaatacgtcgtgaatgaatgtattgcggctggcattactgaaattgtgctggttacacacagttctaaaaactctattgaaaaccactttgataccagttttgaactggaagcaatgctggaaaaacgtgtaaaacgtcaactgcttgatgaagtgcagtctatttgtccaccgcacgtgactattatgcaagttcgtcagggtctggcgaaaggcctgggacacgcggtattgtgtgctcacccggtagtgggtgatgaaccggtagctgttattttgcctgatgttattctggatgaatatgaatccgatttgagtcaggataacctggcagagatgatccgccgctttgatgaaacgggtcatagccagatcatggttgaaccggttgctgatgtgaccgcatatggcgttgtggattgcaaaggcgttgaattagcgccgggtgaaagcgtaccgatggttggtgtggtagaaaaaccgaaagcggatgttgcgccgtctaatctcgctattgtgggtcgttacgtacttagcgcggatatttggccgttgctggcaaaaacccctccgggagctggtgatgaaattcagctcaccgacgcaattgatatgctgatcgaaaaagaaacggtggaagcctatcatatgaaagggaagagccatgactgcggtaataaattaggttacatgcaggccttcgttgaatacggtattcgtcataacacccttggcacggaatttaaagcctggcttgaagaagagatgggcattaagaagtaacatccgtatcggtgttatccacgaaacggcgttgagcaatcgacgccgtttttttatagcttattcttattaaattgtcttaaaccggacaataaaaaatcccgccgctggcgggattttaagcaagtgcaatctacaaaagattattgcttgatcaggaaatcgtcgagggatttaccttgctcatccattgcttttttgattacagctggagtacggccttggccagtccaggttttagtttcgccgttttcgtcaacgtagctatattttgccggacgctgagcacgtttagctttggtgccagatttaacggcagcaaggctattcagcagttcgttcgggtcaataccgtcagcgatcagcatttcgcgatattgctgcagtttacgagtgcgctcttcaacttcagcagcagccgcgctttcttcttcgcgacgttcgttaacaacaacttctaatttttccagcatttcttccagcgtttcaagtgtacattctcttgcctgcgcacgaagagtacggatgttgttcagaattttaagtgcttcgctcattgtagtaatctcaaacttatattggggtggtttgttgaggtaataatagagccttaaattcagttgtgcaatagccaggaatgtaaggaattcaaaattgttctttattttgtgccgccaataaatatcttttcataaaattagccagaaaagacgcggcatatagccctatttacaccgatgatttcgcagcacgtgaggttaaaacttcctgattcatgtcacattttatggggagattatcgtaggctgacgacctttcagtcttctgtattagttgtgtttacgagaattccctattaagcgaatgatgaaaagtagaacagtcgcaataagagcatggacttagtattgcactatctcctggaggtcaacagagggctattacttgcgcaacaggttaaagattgtgaatagttaccagcagtcatttacccgcttataacaagcgaggcagttgtaatgatagctcagaaggattatgcaaggcttcgtaagggagaacgcatatacccacttctgtgcatactgttgagctgaaaaactgacgaattatgataaactccagccaactttatttcatatcattgagggcctgtggctgatggcacagctatatttctactattccgcaatgaatgcgggtaagtctacagcattgttgcaatctagttacaattaccaggaacgcggcatgcgcactgtcgtatatacggcagaaattgatgatcgctttggtgccgggaaagtcagtagccgtataggtttgagtagccctgcaaaattatttaaccaaaatagtagtttatttgatgagattcgtgcggaacatgaacagcaggcaattcattgcgtactggttgatgaatgccagtttttaaccagacaacaagtatatgaattaagcgaggttgtcgatcaactcgatatacccgtactttgttatggtttacgtaccgattttcgaggtgaattatttattggcagccaatacttactggcatggtccgacaaactggttgaattaaaaaccatctgtttttgtggccgtaaagcaagcatggtgctgcgtcttgatcaagcaggcagaccttataacgaaggtgagcaggtggtaattggtggtaatgaacgatacgtttctgtatgccgtaaacactataaagaggcgttacaagtcgacagtttaacggctattcaggaaaggcatcgccacgattaataagaatttctttactgacagggtgagcagggcacttttatcctgtcagttcgttttacgcacttcttccgggctatatacccttctcggcagttttttaacgccgctatacgcctcacagggctcttaagcaccgacgttgacttgtgacctgtaaagtacaatatccctgtgtttaggcgttatacatcgtcgcaaatatgatgaaggctaatgctgtcggtttatggaaaagttgctttgggtaaacaaaaaatacggccccagaagggcaatgccgttcacttaagaggagcggcactatgtttcacaggataacgggtttttgatatcttaaccgacctcggccttgatggtcgggggcgttttgttatgaacaccacttccagagcaccccgaagatgctccagtcgtttcgggatggtccctggtgacgccgtgtttcccagctctatcatttctgatgcgatattcttccacgcaggcagtagccagtggcggttacaacccttctggttcagcgtcagcagcaggtcttcgctgtaaaaaagtttatcaaacaacgtaatagagttatccgggatggtggcgagcatggagtgggccagcacagtttcgctctgccggtaaggtgcggtcacggcattcagcagaatgtgacttcccaggttcattaaggccaccagacgcataaccgggtaggcgttctgccgcttagtggatgtgttggcagacccataatattcacgcagctcgggtttatcaggtgtcctgaactgtgcgccatcaatggcaaaaagttgcaggccgtgccagtcatccttcaggtaacgttccgcgcccctgtctgtgcggtctggcggaagagccattccactggggcggcccccacgcgctgacgcgcctgggtgacagcgctgcgggccagcaggttcatccccgcttcgccatccgcgctcaggttcagacggcgaacaacatcggtaattggctcattgcaccaccatccagataaccatgtcccccggtaaacgacggcggcgaacggtcgcatgagcagaaagcgtcaggcagtgttgtatccactcggtgggaaggtgttctgcaaatagttgtgcagagggcggaggcataagcggatggtcactgaaatcgagcagatcattgagaagtggcataagaaaacggctccctgttgtggaagccgttatagtgcctcagtttaaggatcggtcaactaatccttaactgatcggcattgcccagaaggggccgtttatgttgccagacagcgctactgattaagcggattttttcgcttttttctcagctttagccggagcagcttctttcttcgctgcagtttcaccttctacataatcacgaccgtagtaggtatccagcagaatctgtttcagctcggagatcagcgggtaacgcgggttagcgccggtgcactggtcatcgaatgcatcttcagacagtttatccacgttcgccaggaagtctgcttcctgaacgccagcttcacggatagatttcggaatacccagttcagctttcagcgtttccagccatgccagcagtttctcgatcttagcagcagtacggtcgcccggtgcgctcagacccaagtggtcggcaatttcagcataacgacggcgagcctgcggacggtcatactggctgaatgcagtctgcttggtcgggttgtcgttcgcattgtagcgaataacgttacaaatcagcagggcgtttgccagaccgtgcggaatatggaactgggaacccagtttgtgcgccatactgtgacatacacccaggaaggcgttcgcaaacgcgatacccgcgatagtcgctgcactgtgaacacgttcacgcgctaccggatttttagacccttcgtggtaggacgctggcagatattctttcagcagtttcagtgcctgcagagcctgaccatcagagaactcagatgccagtacagaaacataagcttccatggcgtgagttactgcgtccagaccaccgaaagcacacagggacttcggcatgtccataaccaggttggcgtcgacaatcgccatatccggagtcagcgcatagtctgccagcggatatttctgaccagtagcgtcgtcagttacaaccgcaaacggagtgacttcagaacctgtaccagaagtggtggtgacagcgatcattttcgctttcacgcccattttcgggaacttgtagatacgtttacggatatccataaagcgcagcgccagctcttcgaagtgagtttccggatgttcgtacataacccacatgatcttcgcggcgtccatcggggaaccaccacccagcgcgataatcacgtctggtttgaaggagtttgccagttctgcacctttacgaacgatgctcagggtcgggtccgcttctacttcgaagaagacttcagtttcaacgcctgctgctttcagtacggaagtgatctgatcagcataaccattgttgaacaggaagcggtcagtcacgatgagcgcacgtttgtggccatcagtaatcacttcatccagcgcgattggcagggagccacggcggaagtagatagatttcggaagtttgtgccacaacatgttttcagctcgcttagcaacggttttcttgttgatcaggtgtttcggaccaacgttttcagagatggagttaccaccccaagaaccacaacccagagtcagggaaggtgcgagtttgaagttatacaggtcaccgataccaccctgagacgctggggtgttaatcaggatacgcgccgttttcattttctgaccgaagtaagaaacgcgagccggttggttatcctggtcagtgtacaggcaagaggtatgaccgataccgcccatagcaaccagtttctctgctttttctaccgcgtcttcgaaatctttagcgcggtacattgccagagtcggggacagtttttcatgtgcgaacggttcgctttcatcaacaacggtcacttcaccgatcagaatcttggtgttttctggtacagagaagcctgccagttcagcaattttataggctggctgaccaacgatagccgcgttcagcgcaccgtttttcaggataacatcctgaacagctttcagctctttaccctgcaacagatagccgccgtgggttgcaaaacgttcacgtacagcgtcataaacagagtcaacaacaacaacagactgttcagaagcacagattacgccgttgtcgaaggttttggacatcagtacagatgcaactgcacgtttgatatcagcagtttcatcgataacaactggagtgttgcccgcgcctacaccgatagctggtttaccggagctgtatgcggctttaaccatgcccggaccaccagtcgcgaggatcaggttgatgtctgggtggtgcatcagtgcgttagacagttcaacagaaggttgatcgatccagccgatcagatctttcggagcaccggcagcgatagcagcctgcagaacgatatcagccgctttgttggtggcatcttttgcacgcgggtgcggggagaagataatggcgttacgggtcttcagactgatcaggcttttgaagatagcagtactagtcgggttagtggtcggaacgataccgcaaataataccgattggttcagcgatagtgatggtaccaaaagtgtcgtcttcagacagaacaccacaggttttttcatctttataggcgttgtagatatattcagaagcaaagtggtttttgatcactttatcttcgacgatacccatgccggattcggcaacggccattttcgcgagtgggattcgagcatctgcagcagccagagcggcggcgcggaagattttgtctacttgctcttgagtgaaactggcatattcacgctgggctttttttacacgctctacgagtgcgttaagttcagcgacattagtaacagccataatgctctcctgataatgttaaacttttttagtaaatcatctgctcgaatacgagagtatagtcagtgcggtgatgatttgcttaacctatgaaaatcaaaagcttactcgcgctcacactcactgtgatttactaaaagagtttaaacattagagttattatctctaatgcgtcacttccaggtggcgtaagcaagattactcacttctgggtactgattacgtgatccaaatcaaatttttgcaaagctgacacctttcagcatcgcttttcgccattatagctaacagttaataaattgtagtatgatttggtggctacattagcatgttttgcacaactagataacaataacgaatgatagcaattttaagtagttaggaggtgaaaaatgctgtcaaaaggcgtattgtcagcgcgtcttttcaaccttatttatggctaacattatccggcttttgcttcggagctaaccgtgattcagaccttttttgattttcccgtttacttcaaatttttcatcgggttatttgcgctggtcaacccggtagggattattcccgtctttatcagcatgaccagttatcagacagcggcagcgcgaaacaaaactaaccttacagccaacctgtctgtggccattatcttgtggatcagcctttttctcggcgacacgattctacaactttttggtataagtattgatagcttccgtatcgccgggggtatcctggtggtgacaatagcgatgagcatgatcagcggcaagcttggcgaggataaacagaacaagcaagaaaaaagtgaaaccgcggtacgtgaaagcattggtgtggtgccactggcgttgccgttgatggcggggccaggggcgatcagttctaccatcgtctggggtacgcgttatcacagcattagctatctgtttggtttctttgtggctattgcattgttcgctttatgttgttggggattgttccgcatggcaccgtggctggtacgggttttacgccagaccggcatcaacgtgattacgcgtattatggggctattgctgatggcattggggattgaatttatcgttactggtattaaggggattttccccggcctgcttaattaattcctttcaaatgaaacggagctgccatgctccgtttacttcgtcattatttttactttgttcccgcgcagttatcaaaagcaaaaggaataggtaaaaatattcttctcaaattacagttagttataaggatttccttaactgcttctcctcaccatcatgttattttcgccacatcataatcctgggcttgctgaagaataattgaaatgatattattaattccactgcctttggtagaggaaagtgctaaataataatcaattgttaaattattgtgcatttcactactggaactgtaatcagaaaagatagacatgcttagccaatctctatttgattgaattgaaagatgtttgttaaggcatggatgcaagctatagattctgatacggtcaataaaagagaattgcttaacaattttgcaaaatgtattggcgagtaagaaccgcatttggtactttccgggcaaccgccagacgattctttattggtaatgagaataattaacaattaaagagcgtcgcgaaagaataatgtgtctcgacaggggagacacagtacgaatcgacataaggtgatcgtctgaatcaccagaataaataaagtcggtgatagtaatacgtaacgataaagtaacctgacagcagaaagtctccgagcctgtgcagggtcccaatccgggattacacatgctggttaataccagtaattataatgagggagtccaaaaaacaatgaccaacatcaccaagagaagtttagtagcagctggcgttctggctgcgctaatggcagggaatgtcgcgctggcagctgatgtacccgcaggcgtcacactggcggaaaaacaaacactggtacgtaacaatggtagtgaagttcagagtttagatccgcacaaaattgaaggtgttccggagtctaatatcagccgagacctgtttgaaggcttactggtcagcgatcttgacggtcatccagcacctggcgtcgctgaatcctgggataataaagacgcgaaagtctggaccttccatttgcgtaaagatgcgaaatggtctgatggcacgccagtcacagcacaagactttgtgtatagctggcaacgttctgttgatccgaacactgcttctccgtatgccagttatctgcaatatgggcatatcgccggtattgatgaaattcttgaagggaaaaaaccgattaccgatctcggcgtgaaagctattgatgatcacacattagaagtcaccttaagtgaacccgttccgtacttctataaattacttgttcacccaagtactagtccggtgccaaaagccgctatcgagaaattcggcgaaaaatggacccagcctggtaatatcgtcaccaacggtgcctataccttaaaagattgggtcgtaaacgaacgaatcgttcttgaacgcagcccgacctactggaacaacgcgaaaaccgttattaaccaggtaacctatttgcctattgcttctgaagttaccgatgtcaaccgctaccgtagtggtgaaatcgacatgacgaataacagcatgccgatcgaattgttccagaagctgaaaaaagagatcccggacgaagttcacgttgatccatacctgtgcacttactattacgaaattaacaaccagaaaccgccattcaacgatgtgcgtgtgcgtaccgcactgaaactaggtatggaccgcgatatcattgttaataaagtgaaagcgcagggcaacatgcccgcctatggttacactccaccgtatactgatggcgcaaaattgactcagccagaatggtttggctggagccaggaaaaacgtaacgaagaagcgaaaaaactgctggctgaagcgggttataccgcagacaaaccgttgaccatcaacctgttgtataacacctccgatctgcataaaaagctggcgattgctgcctctagtttgtggaagaaaaacattggtgtaaacgtcaaactggttaaccaggagtggaaaacgttcctcgacacccgtcaccagggtacttttgatgtggcccgtgcaggctggtgtgctgactacaacgaaccaacttccttcctgaacaccatgcttagcaacagcagcatgaataccgcgcattataagagcccggcctttgacagcattatggcggaaacgctgaaagtgactgacgaggcgcagcgcacagctctgtacactaaagcagaacaacagctggataaggatagcgccattgttcctgtttattactacgtgaatgcgcgtctggtgaaaccgtgggttggtggctataccggcaaagatccgctggataatacctatacccggaatatgtacattgtgaagcactaatggcaatacgtggggcaggagtgtcctgctccacggtgtctgatttttatcgcattacagaaggcacaggccagaaggtagggcaatgttaaaatttattctacgtcgctgtctggaagcgattccgacgctatttattcttattactattagcttctttatgatgcgcctcgcgccgggaagcccttttaccggcgaacgtactttaccgccagaagtgatggccaatatcgaagcgaaatatcatcttaatgatccgatcatgacacagtatttcagctacctgaaacaactggcgcacggtgatttcggtccaagctttaaatataaagattatagcgtcaatgacttggttgcatccagttttcccgtttctgccaaactgggagccgcagcatttttccttgcggtaatactgggtgttagtgctggcgttattgccgcattaaaacaaaacaccaaatgggactataccgtgatggggctggcaatgaccggggttgttatccccagttttgtggttgcaccattattagtcatgatatttgcgatcattttgcattggctgccgggcggtggctggaatggtggggcgcttaaattcatgatattgccgatggtggcgttgagtctcgcttatatcgccagtattgcgcgtattacccgtggctctatgattgaagtattacactccaattttattcgtactgcccgggcgaaagggttacctatgcggcggatcattttacgtcacgcattaaaacctgctctgttacccgtgctctcttatatgggccccgcatttgtcggcattattaccggttctatggttatcgaaaccatttatggtttgccggggattggacaactgttcgttaatggcgcattgaaccgtgactattccttagtgttaagcctgaccatcctggttggtgctttaaccattttgtttaatgccattgtcgatgtgctatatgcggttatcgacccgaaaatccgttactgatactggagctcgcgatgatgttaagtaagaaaaacagcgagacgctggaaaatttcagtgaaaagctggaggtcgaagggcgcagcttgtggcaggacgcacgtcgacgttttatgcataaccgtgcggcggttgccagtctgatagtgctggtgctgatcgcgttatttgtaatcctggcaccgatgctttcccagtttgcctatgacgatactgactgggcgatgatgtccagcgccccggatatggagtccggtcactactttggtactgacagttccggtcgcgacctgcttgtgcgcgttgcgattggcgggcgtatcagtctcatggtcggtgttgctgcggcactggtggctgtggtcgtcgggacactttatggtagcctttccggttatctgggcggtaaagtggatagcgtaatgatgcgtctgctggaaatcctcaactccttcccattcatgttcttcgtcattttgctggtgacctttttcggtcaaaacatcctgctgattttcgtggcgataggcatggtttcctggctggatatggctcgtattgtgcgtgggcaaaccctgagtctgaagcgcaaagagtttattgaggcggcacaagttggcggtgtaagcacaagcggcattgttattcgccacattgtgccgaatgtactcggtgtggtggtggtctacgcaagtcttctggtgcccagcatgatcctctttgaatctttccttagcttcctggggttgggtacgcaagagccgttaagcagctggggtgcattgctgagtgatggcgcgaacagcatggaagtctctccatggttattgttgttcccagcgggattcctcgtggtgacgctgttttgtttcaactttatcggcgatggcttgcgtgatgccctcgacccgaaagatcgttaaggagtgcagccatgagcgtaattgaaactgcaactgtgccgctcgcacaacaacaggctgacgcactgctgaacgtgaaagatttgcgtgtcacctttagtaccccggacggcgacgtcacggcggtcaatgatttgaatttttccctacgtgccggagaaacgctgggtattgtaggtgagtctggtagcggtaaaagccaaactgcatttgcgttgatgggcctgttggctgccaacggacgtattggcggaagcgcaaccttcaatgggcgtgaaatcctcaatttgccagagcatgaactcaataaactgcgcgctgaacaaatcagtatgatttttcaggacccaatgactagcttgaatccctatatgcgcgtcggtgagcagttgatggaagtgctgatgctgcataagaacatgagcaaagctgaggcgtttgaagagagcgtgcggatgctcgatgcggtaaaaatgccggaagcgcgtaaacgcatgaaaatgtacccgcacgaattttctggcggcatgcgtcagcgagtcatgattgcgatggccttgttatgtcgacctaagctgctgattgcggatgaaccaacaactgcgctggacgtcaccgtacaggcgcagatcatgacgctattaaatgaactgaagcgggaatttaataccgccatcattatgatcacccacgatcttgtcgtggtggcggggatctgcgacaaagtgctggtaatgtacgccgggcgcacgatggaatatggcaacgcgcgcgatgtcttttatcaacccgttcatccttattctatcggtttgctcaacgcggtgccgcgtctcgatgcggaaggtgaaacaatgttgaccatcccgggtaatccgccaaacctgctgcgattaccgaaaggttgcccgttccagccacgttgtccgcatgcgatggaaatttgtagtagcgcaccgccgctggaagagtttacgcctggccgtctgcgtgcttgctttaaaccggtggaggaactgttatgaatgctgtaactgaaggaagaaaagtcctccttgaaatcgccgatcttaaagtgcactttgaaatcaaagatggcaaacagtggttctggcaaccgccgaaaacgctcaaagccgtcgatggtgtcactcttcgcctgtatgaaggggaaacattaggtgtggtaggggaaagcggatgcggtaagtccacctttgctcgcgccatcatcggtttggtcaaggcgaccgacggtcatgttgcctggttaggtaaagagttgctgggcatgaaacccgatgaatggcgtgccgttcgcagtgatattcagatgattttccaggatccgttggcaagcctaaacccgcgtatgaccatcggcgagatcatcgctgaaccactgcgtacttatcatccgaaaatgagtcgccaggaagttcgcgagcgcgtgaaggcgatgatgctgaaagtcgggttattgcctaacctgattaaccgctatccgcatgagttctctggtgggcagtgccagcgtatcgggattgcgcgtgctcttattcttgaaccgaagctgattatctgtgatgagccggtgagcgcgctggacgtgagtattcaggcacaggtggtcaacctgctccagcaattgcaacgtgagatgggattgagtttaatttttatcgctcatgacctggccgtggtaaaacacatttccgatcgtgtgttggtgatgtatctcggccatgcggtagaactggggacctatgatgaggtctaccacaatccactacatccttacaccagggcattgatgagcgcagtccccatacctgatccggatctggagaagaacaaaaccatccagttactggaaggggaattaccgagcccgatcaacccgccttccggttgtgttttccgtacccgttgcccgattgccggtccagagtgcgccaaaacacgtcctgttctggaggggagtttcagacactccgtttcttgcctgaaagtcgatccgctttaaaaacaataagggctgacagttgtcagccctttttcacgctaaaagcgattatttattcccgccagatgatatggcaaagtttgtgatctttttcgcggcataacagaatgcgggcaaaaacatcgttgatttcaccatcttcactgtccgccagaccaatcaccacttcggcaaaaaagtccgggttcaaatcgaaatcaacatgttcctgccagtcttccgccggatcgaataactccgcgccgccgcgctcttcaaactgaagattgaacagcagaacatcagctggatcgagattgtcggcagccagttcgagaaaaatatcgtaggcctgttcaagcgtttcatcttcagtcaggcgattgtttagatccatatccatagttactacctgtttaacctctgttggcgacgttttacagcaacggactgaagaagtaaaacagtcgctcggcgacacgttgccataatggacgttttagccataaacgggcatcgagcagacgactacggctaatataatcgtcctgaacggcggcgaggtcagcaccaaaacctttatcgtcgattgccagggtaatctcgaaatttagccacagactacgcatatcaaggttaactgtgccaaccagacttagttcgccatcgaccagcacgctcttggtatgcagtaacccgccttcaaactgataaattttaaccccagcagccagcagttccgtaaagaatgcgcgactggcccagccgaccagcatgctgtcattttttcgcggaaggataatactgacatccaccccgcgctgcgccgccgtgcaaatcgcatgaagtaaatcatcgcttggcacaaagtagggcgtggtcatgatcaaatattcacgcgcgctataagccgcagtcaataatgcctggtgaatgagatcttccggaaagccggggccagaagcaattgtgtgaatggtgtgaccgctggcctgttcaaacggcataatattgacatctggtggtggcggcagaatacgttttccggtttcaatctcccagtcgcaggaataaataatccccatcgcggtggcgatagggccttccatacgcgccatcagatcaatccattgccctacgcccgcatcttgtttgaagtagcgaggatcgaccatattcatgctgccggtgtacgcgatgtaattatcgatcatgatcatcttgcgatgttggcgcaggtccatacggcgtaaaaacacacgcatcagattgacctttaaggcttcgaccacttcaataccggcattacgcattagctcgggccacgggctgcggaaaaaagccacactcccggcggagtcgagcatcaatcggcaatgaatgccgcgtcgcgcagccgccattaaactttcagccacctggtccgccatgccgccgggctgccagatataaaacaccatctcaatattatggcgcgcgagctggatgtcgcggattaacgcctgcatcacatcatcactctcggtcatcagttgtagctgattccctttgaccccagcgatcccctgacgacgctcgcaaagcttgaataatggcgcagcgacactgctattttcttcggcgaagatatgcttacaggctttaaggtcgttaagccattttgcggtggaaggccacatcgctctggcgcgctcagcgcggcgtttgcctaaatggagctcgccaacggcaagataggcaataattccgactaacggcagaatgtaaataatcaacagccaggccatcgcggagggaactgcgcgtcgtttcattagaatgcgtaaagttacgcctgcaatgagcaaccagtatcccagaatggccaaccaactcaccaacgtataaacggttgtcatagattagaaatccttttgaaagcgcattgttatgagtttacgcatatggattcatctggcaaataaaaacgcgggaaaagcactggtcagcgtcgggggtgggggtataatgaccattctgttattgcatagagtagttaacatgaagcggagtagaacggaagtggggcgctggcgcatgcagcgtcaggctagccgacgtaaatcgcgttggcttgaggggcaatcgcgccgaaatatgcgtatccacagcatcaggaagtgcattctaaacaaacagcgtaactcgttattgtttgcgatctacaatatctaaatgtactgggcaccattgcggtgcccaataagtttactcttccgtctttaaactttatttttgcgcgctttctttactgtcagctttcgtttctagttcatcgttatcgctgaaaataccatgaccactgttcaacaacatactaacgagcatatcattattaatctcttcaccatttaaaactcgcgccagaatttcgctgccaaacagttgcggactgagaatgatatccggatgtaccatcttaatcttattcaggtttttgctatcactgacggcgagaactgttttgacatcactgctcatatcttttgcgctgagtacaacaaacgcgttatctgcatcgttatcactcagcgccagaatggcccggcaacgatcgattcccgctttctttaatacagaactgtcattactgtcaccggggataacatcagcattatcgcctaagcgttgctcaagttgcttgatatcatcttcaggcaagttgctgataaccgttacgttttgtccgcgttgattcagttgcaggatcgtattgatggcgagaatgctatgtccgcaaacaataaaatgatctttacgatgcattgtatgattgtttccttttacaagtttgttgaatcccccgcggataagcggaccaaaaatactggtcatagatgtggcaaaaacggtaatgccggaaataatgacgctaatagtgaacaatcgtgcactttcagaaacagggacaatatcgccatagccgacggtactcatggtttctatgctaaaatagaacgcggtcatcaaactttctattcgcggattaaaaccttcgcttaaataaagcgcaccgtaggtactgtaaaacagtaatgtcgtgaaactaataaatgcaaaaattgtcccggctgcggcgctactgtgggagaagtctttgcgcagtatcagcaaaaacaccagcgtaaaaatgcaaaatccaatactaaatttcagccagggataaaaatgcagggtgtaaattagcgctatcaacaacaaaatgatactgattgcccatgcgagctttgcccggaacagtaagccaatggagttcaggacaagaaagacgccgagcataaagagtggggcgtttgccagcaaggagagatccaactcactaaatgctttgatatggaaaatatcaagcaaattgacgctcataccatagattgttttaaaaataagcaatccatttaaaaagacggccagcgcgagaatgtcgtgccgaagggtcacccataaatttgttgctgtttgtttgaatgtagcccagtgactcactgatacctctgtaaccacaattttgtttaattatcttagcgtgcacattttctgaacatacatgcagcgcgtgaatgtgttaaacaatagtagatgactttatccgcagtaatcaaaggatttgagcgagcaactgtacctcaggaaaggtcatttttcctgaatatgctcacatcatataaagaaatacagataaagttattatctgcttgtggtggtgaatgcactgaccggctataaggaaaggccaaacaagaacacggttgcaaaaaccgtgcccttaaatattgaatctctattcagaacactttcttaaatggtttcacactaacgtgttcatagactcctgccgctacgtacgggtcagcatcggcccaggcctgagctgcttccaggctttcaaattcagcaataacggtactgccagtaaatcccgcagcccctggatcgttactgtctaccgctggcattggaccagctgtcaacaaacgaccttcatcatgcagtaactgtaaacgtgctaaatgtgccggacgaacggaaaggcgtttttcgaggctatcagctttgtcttgagcgtaaataacatacaacacgggcacaactccttgttcgggaaagttgtaaagtacgttatttgaaagggcgaagatctgcaacggaaagatgatgtctttgttaaggccatgcataaagtaagggtaattacgccaaaaatgacattttcactgatcctgatcgtcttgccttattgaatatgattgctatttgcatttaaaatcgagacctggtttttctactgaaatgattatgacttcaatgacccttgatttacctcgccgcttcccctggccgacgttacttagcgtctgcattcatggtgctgttgtggcgggtctgctctataccagcgtacatcaggttattgaactacctgcgcctgcgcagccgatttctgtcacgatggttacgcctgctgatctcgaaccgccacaagccgttcagccgccaccggagccggtggtagagccagaaccggaacctgagccgatccccgaaccgccaaaagaagcaccggtggtcattgaaaagccgaagccgaaacctaagccaaaaccgaagccggtgaaaaaggtacaggagcagccaaaacgcgatgtcaaacccgtagagagccgtccggcaagtccgtttgaaaatacggcaccggcacgcctgacaagtagtacagcaacggctgcaaccagcaagccggttaccagtgtggctagtggaccacgcgcattaagccgtaatcagccgcagtatccggcacgagcacaggcattgcgcattgaagggcaggttaaagttaaatttgacgttacgccggatggtcgcgtggataacgtacaaatcctcagtgccaagcctgcgaacatgtttgagcgtgaggtgaaaaatgcgatgcgcagatggcgttatgagccgggtaagccaggcagtgggattgtggtgaatatcctgtttaaaattaacggcaccaccgaaattcagtaagcagaaagtcaaaagcctccgaccggaggcttttgactattactcaacaggtaaggcgcgaggttttccttcaggatcaaccgcgacatacttaaataatgcttctgtcgctttatagcgttgcccaattggttcagacgctacttttttcacccacacttcaatattaatgctgacgcttgtcgtccctttctggacacagcgtgcatagcagcacaccacatcgccgaccgcaaccggccgtaagaaagtcattccttcaacccgcacagtcactacgcgaccgtgggcaatttcttttgccagaatagcgccgccaatatccatttgactcattaaccaaccaccaaagatgtcaccattggcattggtatcggcgggcatggctaaagtacgtaaaacaagatcgccctgagggacgttatgtgttgtagacatggtaaaaccgacttaaaaggaaaatcacaggcgcgatgctactatgattttcctgaggagaacagaggagatacagcgccagccccgaaggactggcagtctggttaggatttatcttcctgcggcatgtggcggtagatatagataccgcttaacaatgtgaagattaaggtaagggcggtcaggccaaagactttaaagttgacccaaatattttgcggcagccagaatgcgatgtagatgtttgccagaccgcaaaggataaagaaaacagcccaggccagattcagcttgctccataccggttgcggcagcgtgagttctttacccagcatccgctgaattagcggctttttcatcacccattggctgactaacagggctcccgcaaatagagcataaatgacagtaaccttccatttaataaactcatcattgtggaagaacagcgtcaagccaccgaagacgaccaccagaacaaaagtgatcagggccatcttctcaaccttacgaaagcgaacccagctatagataagcacaatcgccgtggcgacgatcagcgccgcagtagccgcatagatgtcataaatcttgtaaaacgcgaaaaagacaaccagcggtaaaaaatcaagaaactgcttcattttacgattccgtaatcaaatgcttaaggttattggcgaatcaacatatacaggcggaacagatagatgagcaatatggcactaatcaggttgctcaaggtgttcgccagtacggcaccaatttccggggttaatgcggcaaaagaagaggcaaaaagcagcaacagtgtttttgccagcaaccagctcagtactgcgggtgccaccagacgcatattcgcccaagtcagccgcatactgctacgcatgctggcaaaaacgcccattttgtcctgtaccaacatcaccggtgccagggccagtaaaatggccatgataattcccggaacgaccaccagcatgatgccaatctgtactaaaagggtagtcagaaaaatcagaataaataactttggcaatatcggcgcactggcaccaatagctcgcagcgcactgactctctgacccgcagacaccagctggataattaatattacgcctccggcgagaatggcgttaccgattaatccactaaaagtggacgccgcactagcctgcagcaaaatttgttgctgttccggactcatattctgaaccaggtcgaacaacccactactgccgctaacgggcacgccgtcattgagctgcgcaagctgtgcatcactgggactgaaaacatgccctaacaccactgtgataaacgcacatagcaagcttaccaacagaatggtcataaattgattacggaagaaatttccggtgtcacggtatacggactgcgccgtgatagacatgcactctccttgagttttatgcaggtgttaattagcgggcaattgtaccctggttaagcctcgggtggcagcatcaggtcttgtatggaaaagcatatctttgtaaagcggaggtaattgctggccttcaggcatgggcaaatcgcggcaagtggcgaccgagttaatatttgcgtagcgaaaatatttaaaaattgatttaaatcacattaaccaggattctcaatgcaacttctaaattaatccagatcaataaagggtgaattatcatatgtaatgtgatctatgtaggatcatttgttactccaatgtaggtatattcgtcacgtttttataaccataacgacggagcggatatgaaaaagttaacagtggcggctttggcagtaacaactcttctctctggcagtgcctttgcgcatgaagcaggcgaattttttatgcgtgcaggttctgcaaccgtacgtccaacagaaggtgctggtggtacgttaggaagtctgggtggattcagcgtgaccaataacacgcaactgggccttacgtttacttatatggcgaccgacaacattggtgtggaattactggcagcgacgccgttccgccataaaatcggcacccgggcgaccggcgatattgcaaccgttcatcatctgccaccaacactgatggcgcagtggtattttggtgatgccagcagcaaattccgtccttacgttggggcaggtattaactacaccaccttctttgataatggatttaacgatcatggcaaagaggcagggctttccgatctcagtctgaaagattcctggggagctgccgggcaggtgggggttgattatctgattaaccgtgactggttggttaacatgagtgtgtggtacatggatatcgataccaccgccaattataagctgggcggtgcacagcaacacgatagcgtacgcctcgatccgtgggtgtttatgttcagtgcaggatatcgtttttaattccgcacaaaaacgaccccgtaatatacggggtcaataaggacatggtataaagggtattatttcttcgcttctacgccatcagtttcagagcgaattaaaaatttctcagttgtttgcggaatattctgaatcagccagtcggccatttgcttttcctcatttaaaatcgcttcgatggttggaatactagctgtatcaccggcattttttgctgctgctaatagactggtgtaacaggcgatttcaaattgctcgaagacatatccgctaatagagcctttgactatttcatcagaagggaatataccaccgatactctgcccaagcgcagccattttactcatggaatctttaatgacactacgactaatgtcattacgatcaagaatagtttccagttgaacaatctggtttttggtttcactaagatgttgttcaatacgagcgcgtagttcaggataattatctatacggctggccatggattcaagcatagattcggcttgcttttccattgcgtgggcgtcacgtaaccagtcatgataatgttcaatacgattcatgaaaatgtcctctttataaaatgactaaaagttaaaattcatatttcaggctttattttcggctttcttatttacgttattaatggccagatcagtcagtttgatgtcggtggccttttcttcttccagggtttctttcagaagcttcgctgctttacggtaacctaattgttcagccagcgtcgctaatgtcccgtaactggcaatctcataatgctcgactttctgtgctgcggcaatcagtgcggcatcacgcacttcgtttttctcggtactttcgatgacctcattagcttcttcaataagaccttccattgccacacatttcatgcgcttaattttcaggttgctttcggactccacaacttgatcaatacgttcaatctgtccatgagtttcctcgaggtgcgcatgaaaagcctgacttaatttttcattacttgttgctcttgcgagttttgccagtgcccgggttaattgtttttctgcgctgtaggtatcactaagcaggtgaataaatacatcttcaatggtcttcatattcatatttttctccagtgaaatcactgcgagccatacggcccgcagatgcaattatctttatcagctgatattaataattaacggtgaatcaggatttgccacttttattaccaccgctttgttgaccgccttttttacccgcttcagatgcgcgttgcggatcatttttaaaattaccgccgctatgctgaccgcctttacggcctgcgtcggatgccttctcacggtcttcggcgaaatttccactaccaccacgatgttcggccatgttatttctcccgttgcgttgcattgtttcattaatatgagtgttgtgtgtcgacactcattaaaattagtcgctaatgagaattagtcaaattaagcgcaacgagaagatagagggaaaatatattttgaggaacattctggatatattaacaattacctgaggaataagtgacttagagaaaattattgattttactggtgttatgttgcgggattaatttgtttgattatattactgttgggcggaaaaatgacgtaagttgacgttcgaccggggtaagcgaaacggtaaaaagataaatattaaatgaatttaggatttttccggcttcattaaagaaagttaaaatgccgccagcggaactggcggctgtgggattaactgcgcgtcgccgctttcatcggttgtacaaaaactttcagtgccgccagcattttctctggctcattaatatgttgctcgatgattttaacaatggcgctaccagaaatcgcgcccgcagctcctgcatcaatcgctgcttttacctgatccggggcggaaataccaaatccctgcaatggaggtgcagcgttgtactctttcagcttcgcaaccagatgattgaggggtaacgcggcgcggttttctgcgccggtcacgcctgctcgactcagcaaataggtgtaaccacgaccgtaagaggctatctggcgcagcaggtcgtcatcggcatttggcgggcagatgaagataggtgcgacattatgacgcaacgcggcctggcggaagggcgcggactcttcaactggcacatcggcaaccagcacgctatcgacgccgactttttcgcactgggcataaaactcatcaatgcctttgttaaacaccagattggcatacatcaacaggccaatgggaatggtcgggtgtttctggcgaatcagtgccagcatttcaaaacattgtgccggagtcacacctgccgcaaaggcgcgcagagtggcgttttgaatcgtcgggccatccgccagtgggtcggagaaggggatacctaactccagcgcgtcagcaccggcttcaattagcgtatcgataattttcaaactctgctcaatgcccggatcaccgagcgtgacgaaaggaacgaatgcgccttctttgcgctccttcaactgggcaaacagagattcgtagcgttccatcagatttcccctcgtgctttcaaaatatcgtgaacggtgaagatgtctttatcgccgcgaccggaaaggttaaccaccagtagctgctctttatccgggttttcgcgcatcattttcaacgcatgggccagggcgtgggaggattccagcgccgggatgatcccttcgtgcaggcacagcgttttgaaggcttcaagggcttcatcatcggtaatagacacgtaatcagcgcgtccagtgctgttaagatacgcgtgttgtgggccgacagacgggaaatccagtccggcggagatggagtaagattcttcaatctgcccgtcttcggtttgcatcatcggcgctttcataccgaaatagatacccacgcgaccatgttttagcggtgcgccgtgctcgccagtttcgataccgtgaccacctggctccacaccaatcaggccgacgttggtttcattgatgaaatcagcaaacatgccgatggcattgctaccgccgccaacacaggcgataacggcatccggcaggcgaccttctctttccagaatctgcgctttggtttcttcgccaatcatccgctgaaactcacgcacaatggtcggataaggatgcgggccagctgcggtgcccagcatatagtgcgcggtttcgtaactaccggaccagtcgcgcagcgcctcgttacaggcatctttcagcgtcgcggaaccgctatgcaccgggatcacttccgcacccattaagcgcatacgaaaaacgttagggctctggcgttcaacgtctttggcacccatataaatacggcatttcaggccgagcagggcgctggcaagggcgctcgccacgccatgctgaccggcaccggtttcggcgatgatttcggttttacccatccgcttcgccagcaacgcctgccccagcacctggttagttttatgcgcgccgccgtgcagcaaatcttcacgcttgagatacagcgtggtgttcgtcccggctgtaatgttctggcatttggtcagcgcggttggacgcccggcatagtttttcagcaggtcgttgaactgagcctgaaattcaggatctttttgcgcactgacaaaagcttcttccagctggcgcagagcaggcatcaggatttgtggcacgtacatgccgccaaactcaccaaaataggggttaagtaatgttgtcattgttcctttccttaatatgcgcgcagcgtctggaaaacgctggccaaaagacgtgcgtctttgatgcccggttggctctctacagcagaattaaaatcaagtccggcgcagccggtttgtgccgcttccacgcagttatctgcgcctaagccccccgccagcagaacgttgccaaggctttgaccatttaatagactccagtcaaaacgttgcccgcttccaccctggccgttgtctaaaacatatttatcaacgtgctgaaactcgcgggcgggcagggtttcaccgacgcttaatgctttccagatggcaacatgtgctggcagagcttcacgcagcgtatcgatatacagctgttcttcattaccatgcagttgcactgccgccaggcttaacaccttagctttgtccaccacatcggcaatatcgtgattgcggaacacgccaacatactgcaacggtgccgcagccatcacttcctgcgcctgttcaacgttgacgcaacgcggacttgtcgcaacaaaaatcaacccaccgtaaatcgcgcccgcgtcataagctgctttagcatcttgcccacgcgtcaggccacatactttattctcacccagcaacacccggcgcacggcggcgtgcaaatcgtcatgggccatcaacgcgctaccaatcagaaaaccgttagcgaagtggcttaactcgcgcacctgagcgtaagtattgatgccggattcgctgattaccgtcacgttgtgccccagtttcggcgcaagctcgcgggtacggttgagatcaatgctcaaatcacgcagatcgcggttgttgatgccaacgacctttgctcccaatgcaatggcgcgctcctgttcctcttcattactgacttcggtcagcacccccatctccagactgtgagcgacggcggcaagctggcgatattggtcgtcatccagtacactaagcattaataagcaggcatcggcctggtaatagcgcgccagatagatctggtaagggtcgataatgaagtctttacataaaatcggctgcggggcgatttggctgacgatggggaggaaattaaagctcccctgaaaatatttctcatcagtcagcacgctaattgcgctagcgtaatgtttataaatggcggcaatgcgtgctggatcgaaatcatcacggatcacgcctttactcgggctcgctttcttgcactccagaataaacgccgtgcgcgcaccctgtagcgcatcataaaaatgtcgcgtgctcggctgaacctcattctgaaaactggccagcggttgctgctgtttgcgggcttctacccaaatcgccttgtctgcgacgattttcgctaaaacggtttgcatcatttaccctcgtgccgccagtgcggtgactctgtcgtaagcggaaccactgcgcagtacctcaagaacggtttgcgcattggcttgcagatcttcatggccatgcaggcgcattaacatggcgacgttcgcagcgacggctgcttcatgggcggcgtcgcctttaccttgtaacaaacgtgttaaaatgtcacggttttcttccggtgttccgcctgccagttgctcctggtggtagggtgtcaggccaaagtcttctgcggtgagctgatagcttttaatttcgccgtcatgcagttcggcaacgattgtcggcgcgtgtaaactaacttcatccatcccgccgctgtgcaccaccgccgcgcgttgataccccagcacgcgcaaggtttcggcaatcggcagcaccagttccggactataaacaccaattaacgccagcggcggatgcgccgggttaatcaatggccccagcacattgaacagggtgcgggttttcagttgctggcgaaccggcatcgcgtggcggaatccggtgtgatacttcggcgcaaagaggaaacatacacctaactcatccagcgcctggcggcttttatcggcgttcatatcaagattaataccgaacgccgccagcagatcggagctaccagatttactggagacgctacggttgccgtgtttcgccactttcagcccacaggccgcggcgacaaacgcactggcggtagaaatattgatactgttgctgccgtcaccgccagtaccgacgatatcagcaaacagataatccgggcgcgggaacggcgctgcgttttccagtagcgcggttgctgccccggcgatctcgttcgggtgctcaccgcgaattttcatgctcaccagcgccgccgccagttgttccggcttcagctcgccacgcaccaccgcactaaacagctggtggctttcttgttggctaagcgtctgcgcctgatacagtttttccagaatcggttgcagcgtgttggctggctctagtttctgctgcgcccaggccagcgtttgttccagcaggcgagcgccctgggtggtgagaatggattccggatggaactggaatccacaaacgcgatccgcatcgtgacgtactgccatcaccatgccattaaaatgggcgttgatggttaaaccggccggaatgttactgccaaccaggctgtgataacgcgccaccggcagcgggtttgttaatccggcaaacatcgcctgaccgtcatgttcaatgctggaggctttaccgtggagaatttcgcccgcctgaccgacatagcccccgtaagcttcgacaatcgcctgatgtccgaggcaaatgccaataatgggcagcttgccacgcaagcgggtgaggagttccggcatacaaccggcttcgctcggcacaccggggccaggagaaagcatcagcaccggattgctcatggtcgccaggcgttcaattaaggtttgcgccggaatatggttgcggtaaatcaccacgttatgcccattgctgcgcaactgatctgccaggttgtacgtaaaagagtcgatattatcgagcagcagaatgtcagccatcagaaagtctcctgtgcatgatgcgcggtggcaatagcgcgcagtacagcgcgggctttgttacgggtttcgtcggcttcgctctgcggaacagaatcaaggactacaccagcacccgcttgcacggtggcgataccgttttccaccagcgcgctgcggatcacaatgcaggtgtcgagatcgccatgcgcggtgaaataacctaccgcgccgccgtagctgccgcggcgacgaccttccgcctcggcaattaactgcatagcgcgtactttcggcgcaccgcttaacgtccccatattcatacaggcgcgataagcgtgcagggcgtcaagatcgtgacgcagttcgccgactacgcgagagacgaggtgcatcacataggaataacggtcaactttggtgagatcggcgacgtagcggctgccgggggtgcaaatgcgtgccagatcattacgggcgagatcaaccagcatcagatgttcagacagctctttatgatcggtacgcatttccagttcaatacggctgtcgagatctctgtccagactaccatcggcgcgacgaccgcgtgggcgtgttccggcaatcgggtagatctcaatctggcggctggtggcatcatacttgaggctgctttccgggctcgcgccaaatagggtgaaatcattatcctgcataaaaaacatgtacgggctgggattactctttttcagcacgtaataggccgccagcggactcgggcagggcagagagaaacggcgagatggcaccacctggaaaatttctccagcgcgaatcgctttttgcaacaaacgcactacgccaccgaactcttcatcgctctgattacattcacaacgcatatgcggcacggaaaccactggcagcggcggcgcggcttcggtcagttgctgacgtagttcgttcaggcgagcagtgagacgttgtttttcttcttcattcggagcaaacaggctggcctgaatacgggtgctttttttctgatggtcaatcaccatcagcgtttcagcgagataaaaacagaaatcagggcagttattttccgcactcagttgcggtaaatcttcaaatcccgccacaaggtcataagagaacaggccgccgaagaacatggcttctcgttcttccttcggtacattcaacagattctgcaataaacggaaagcgtcaaaaacgctaagggagcataagcgggcgtcttcatccagcagtggactgacaggggggaagcgcagcacacggcagtttggactttgttcactttccacacccgcaggcagggcgttatccagtagtgccaggagggcttcgccgttgccggaaagtgcctggattgtgacagtgtcacctaaagctgtaatgcgcagcgcactgtctaccagcagcaggctttttaaatcatctttgctgtcgatatctgcggattccagcagcagcgttgccggacgatccccacacaactggtgaaaaagcgcggtgggattgtcgcgataagcgccttcgcaggttagcagttcgagagtcggtttttgtgtttgcattgttattctctaattttgttcaaaaaaaagcccgctcattaggcgggctgggtatctgattgctttacgcatggtgaatacactgcccgtttcaggaagtgcgccaccaacctttcagtacgaaaattgctttcattgtcgataccctttttacgtgaacttgcgtactagttaactagttcgatgattaattgtcaacagctcatttcagaatatttgccagaaccgttatgatgtcggcgcaaaaaacattatccagaacgggagtgcgccttgagcgacacgaattatgcagtgatttacgacctgcacagccataccacagcttccgatggctgcctgacgccagaagcattggtgcaccgtgcagtcgagatgcgcgtcggcaccctggcgatcaccgaccatgacaccacagctgcaatcgcgccagcaagagaggaaattagtcgtagcggactggcgttgaatcttattcccggcgtggaaatttccacggtctgggaaaatcatgaaattcatattgtcgggctgaatattgatattactcatccgctaatgtgtgagttcctcgcgcagcagacagaacggcgcaatcagcgggcgcagctgattgccgaaagacttgaaaaagcgcaaatacctggggcgctggaaggcgcacaacgactggcgcagggcggcgcagtgacgcgcggtcattttgcgcgtttccttgttgagtgcggcaaagccagtagtatggcggatgtctttaaaaagtatctggcgcgcgggaaaaccggatacgttccgccacagtggtgtacaatagaacaagctattgatgtcattcatcattctggcggtaaggcggtgctagctcatcctgggcggtacaatcttagtgctaaatggctgaaaagattggttgcgcattttgccgaacaccacggtgacgcgatggaagtcgcgcagtgccagcaaagccccaatgaacgtacccagctggcggcccttgcgcgtcagcatcatttatgggcaagtcaaggatctgattttcatcagccatgcccgtggatcgaactgggtcgtaaactctggctgcccgcaggcgttgaaggcgtctggcagctatgggaacagccgcagaacaccacagagagggaattatgagccagtttttttatattcatcctgataacccacagcaacgtctgatcaaccaggcggtggagatcgtgcgtaaaggcggggtgattgtttatccaactgattccggctatgcgctcggctgtaaaattgaagataaaaacgcgatggagcgtatttgtcgtattcgccagctgccggacggtcacaactttaccctgatgtgtcgcgatctttctgaactcagcacctatagttttgttgataacgttgcgtttcgtttaatgaaaaacaacacgccgggcaactataccttcatcctgaaggggacgaaggaagtgccacgccgtctgttgcaggaaaaacgcaaaaccatcggtatgcgtgtgccttctaaccctatcgctcaggcgttacttgaagcattgggcgaaccgatgctttccactagcctaatgctgccaggcagcgaatttaccgaaagcgacccggaagaaattaaagatcgtctggaaaaacaggtagatttgattattcacggcggctatctcgggcagaaaccgacaacggttattgatcttaccgatgatacgccggtcgtggtgcgtgaaggcgtaggtgatgtgaagcctttcttataacaaattgcgttccacggatggaagactatggcagggaagtttcgctgcattttgctgttgatagcagggctgtttgtaagttctctaagttatgcagaaaacacggagatcccttcttatgaagaagggatcagcctctttgatgttgaagccactctgcaaccagatggggtgctcgacatcaaagaaaatattcattttcaggcgcgaaatcagcagattaagcacggcttttatcgtgatttaccacgactatggatgcagcctgatggggacgctgcactgctgaactatcatattgttggcgtcacccgtgatggtattcctgaaccctggcatcttgactggcatatcgggttaatgagtattgtcgtgggcgataaacaacgtttcttgcctcaaggcgactatcattatcaaattcattatcaggttaaaaatgctttcctgcgtgagggggattctgatctgctaatctggaacgtgaccggtaaccactggccgtttgaaatttataagacccgtttttctctccagttctctaatattgcgggtaatccatttagcgaaatcgatctttttaccggagaagagggcgacacatatcgtaatggccgcatccttgaggacggaagaattgaatcccgcgatccgttttatcgtgaagatttcacggtcctctaccgctggcctcacgctttacttagcaatgccagcgctccgcaaacgacgaatattttcagccatcttcttttaccctccacgagtagcttgttaatttggtttccgtgtctgttcctggtttgtggatggttatatctctggaagcgcaggccgcaatttacgccggtagatgtgattgaaaccgatgtcattccgccagattacacgcccggcatgttacgtctcgatgcgaagctagtttacgacgataaaggtttttgtgccgatatcgtaaatctgattgtgaaaggaaaaattcatctggaagatcagtctgacaagaaccagcaaatcctgattcgtgttaatgaaggcgcgaccagaaataatgcggtattactgcccgcagagcagttattactggaagcgttatttcgtaaaggcgataaggtcgttcttacggggagacgcaacagagtcttacgcagggcatttttacggatgcagaaattttatctgccgcgtaaaaagtctagcttttaccggtctgatacttttttgcaatggggtggactggcaatattggcggtcattctttacggtaacttgagtcctgtaggctgggcaggaatgagtctggtgggcgatatgtttattatgatctgctggattattccttttttattttgttcccttgagcttttgtttgcccgcgatgatgacaagccttgcgttaatcgtgtaatcatcactttgtttttaccactgatttgtagtggcgtggccttctattctctctacatcaatgtcggagatgtattcttttactggtatatgccagcgggttattttaccgctgtttgcctgaccggttatctcactggcatggggtatatttttctgccaaagtttacccaaactggacagcaacgttatgcccacggtgaagctatcgttaactatcttgcgcgtaaagaggcagcaacacacagtggacgtcggcggaaaggggaaacacggaaactggattacgcgttgctaggttgggctataagcgcaaatttggggagggaatgggcgttacgcattgcccctagcctttctagcgcgattcgcgctccagagattgcccgtaacggcgttttattcagtttacagacgcacctaagttgcggggccaataccagtttgttggggcgaagttattccggtggtggtgctggcggcggcgcgggtggcggaggcggtggtggctggtaattaagctgatgttaatcgaaacaagctttaaccataaagatagtgtagtatgttgcgcctcaaagccaggccgataaacgtcgagtcgtttacttaaggcctgaagagttcaaacagactttactatcagtgagtcagatgtaagttctgactcactgttgcacaaaagcatatcagacgcctgggaaggcgacaccaaaaggaagctctatgagcgaaaagctacagaaagtgctggcgcgtgccggccacggttctcgccgtgaaatcgaatctattattgaagccggtcgtgtgagtgttgatggcaaaattgctaaactcggcgatcgtgttgaagttacccctggattgaaaatccgtatcgatggtcacctgattagcgtacgtgagtccgctgaacaaatttgtcgcgttctggcctattacaaaccggaaggtgagttgtgtacccgtaacgatccggaaggacgtccaacggtgtttgaccgtctgccaaaactgcgtggcgcacgctggattgccgtgggtcgcttggacgttaatacctgtggtctgctgctgttcaccaccgatggtgaactggcaaaccgtttaatgcacccaagccgtgaagttgaacgtgaatatgccgtgcgtgtatttggtcaggttgacgacgcgaaactgcgtgatttgagtcgtggcgtgcagttggaagatggtccggcagcttttaaaaccatcaagttcagcggcggcgaagggatcaaccagtggtacaacgtgactctgaccgaaggccgtaaccgtgaagttcgtcgtctgtgggaagcggttggtgtgcaggtgagccgcctgatccgtgttcgttacggtgatatcccactgccaaaaggtctgccacgcggtggctggacggagctggacctcgcccagactaactatctgcgcgaactggtggagctaccgccagaaaccagctctaaagtcgctgtagaaaaagaccgtcgtcgcatgaaggcgaatcagattcgtcgtgcggtgaaacgtcacagtcaggtgagcggcggtcgtcgttctggcggacgtaataataacggttaatcaaagtatgccggacgtcatatccggcatttttacagattaataatcgatccctatctgcgcttttacaccggcatcaaacgcatgtttgacggggcgtaattcacttaccgtatctgccagttcaagaatatcccgatgacaaccacgacccgtgataatcaccgtctgttgatgtggacgttcatttaacgcctgcaccacttcttccagtggcaaatagtcatacgccaccatatacgtcagttcatcaagcaaaaccatatccagactggaatcagcaagcatccgctttgcatgttgccagacttcgcggcaggcggcggtatcagactcgcggttttgtgtatcccaggtaaagcccgttgccatcacctgaaactcaacgccatgtggctccagcagattgcgttcgccattaggccaggtgcctttaataaactgcacgacgcctactttttttccgtgaccaactgcgcgtgttgccgtaccaaatgccgcggtggttttgccttttccattgccggtaaagacgatgataataccgcgttcatcctgggcctgggccacacgagcatctactttttctttcactcgctgctgacgctgttggtagcgttcatcactcattgggaaattcctggtttacggcccggttgggcgtcaaaggtcatgccggttttacggcggctgtcatcgcccatcagccagaggtagagcggcatgatatcagcgggtgttttaagtttctgtggatcttcggtcgggaaggcgctggcacgcattgcggtgcgcgtaccgcctgggttaatgcagttgacacgcaggcgctgctgatattcatcggccagtacctgcatcatcccttcggtggcaaatttgctcgctgcatatgcaccccagttggctcgtccctgacgtccaacgctactactagtaaagaccagactaccggcgtcgcttttgagtaataaaggaagcagtgcctgggtgagcataaaggtggcattaacgttgacctgcatgacgtcctgccagacctgcggattttgttcgctcattgggcaaacatcgccgagcaatccggcattatgcaaaacaccatccagacgcggataattaacggcaatgcgctgtgccagttgttggcaattttcggacgtgcaggtcagcaaatcgagaataaaccactgtggctgacgcccagtttcttcgtttatgtggctggctacctgacgtaatttttcttcattacggcccaacagaatcactgtcgcaccatagcgtgcatacgtcatcgcggcttcacgaccaataccatcgctggctcccgtcaccaggataatgcgatcattgagtaaatcttgttttggctggtaatgcatggctactcctcaacgacgttgtctgtcgcgctgccagtgtactttatgactttggggctttatgcctgaaacagaagggcatttcaatcagcctggggcgataacaccgcaaaatggatactttgtcatactttcgctgcaataacatctctgcgagacggcttaacatgcctgttgtaaactgtgagccaaagcgttgtttaaccaaggtggggactcgtggaattgttgtctgaatatggtttgtttttggcgaaaatcgttaccgttgtgctagcgattgcggcgattgccgccattattgtcaatgttgctcaacgtaataaacgccagcgtggcgagttacgggtcaacaatctcagcgaacagtataaggagatgaaagaagaactggccgcggcgctgatggacagtcatcagcaaaaacagtggcacaaagcgcagaagaaaaagcataagcaagaagcgaaagcagcaaaagcgaaagccaaactgggcgaggtggcaactgacagtaaaccccgcgtctgggtgctggattttaaaggcagcatggacgcccatgaagtgaacagcctacgtgaagagataacggctgtactcgcagcattcaaaccgcaggatcaggttgtgctccgtctggaaagccctggtggcatggtgcatggttacgggctggcggctagccaactgcagcgtctgcgcgataaaaacattcctttaactgttacggtagacaaagtcgctgccagcggcggttacatgatggcctgtgtggcggacaaaattgtttccgcaccgtttgctattgtgggttccattggcgtggtggcgcaaatgcccaactttaaccgcttcctgaaaagcaaagatattgatatcgaactgcacactgccgggcagtataagcgcacgctgacgttgctgggtgaaaataccgaagaagggcgggagaaattccgcgaagagttgaacgaaacgcatcagttgtttaaagattttgtgaagcgtatgcgtccttctctggatattgaacaggtggcaacgggtgaacactggtacggacaacaggcggtagagaaaggcctggttgatgaaatcaacaccagtgatgaagttattcttagcctgatggaaggccgtgaagtggtcaatgtacgctatatgcagcgtaaacgactcattgaccgattcaccggcagcgcggcagagagcgccgatcgattgttgctacgctggtggcagcggggtcaaaagccattgatgtaaaagacaaacgcgaggctaagacctcgcgttttgctttaatcaaccagatgatatttttcactaagcacatgggccaggtgtttgaacatattaaacaccgcggtgcttttggctgttggcaatccttgttcatctaaaaagtagtcgccggtaaataccagcacgccattacgctgcgtgacgccggtggcttcaatccctgcgagcgtatcctcatgctcacgaatgattttgttggcctctttcaacagcgtttcgcggtcgatgggttgtgtctctttgttcattatttactccttaaacaaggacattagtctacgccaggcatggcttgcagacaaatataccacgctggtggcaagagcgccttactggcaactttggattttgcatgctaataaagttgcgtatcggattttatcaggtacagtgtgacgctttcgtcaatctggcaatagatttgcttgacattcgaccaaaattccgtcgtgctatagcgcctgtaggccaagacctgttaactcagtcacctgaattttcgtgaacagagtcacgacaaggggttgatatccgcagagagcgagtccatatcggtaactcgttgccagtggaaggtttatcaacgtgcgacgcattcctggaagaatcaaattaggtaaggtgaatatgggtaaagctcttgtcatcgttgagtccccggcaaaagccaaaacgatcaacaagtatctgggtagtgactacgtggtgaaatccagcgtcggtcacatccgcgatttgccgaccagtggcagtgctgccaaaaagagtgccgactctacctccaccaagacggctaaaaagcctaaaaaggatgaacgtggcgctctcgtcaaccgtatgggggttgacccgtggcacaattgggaggcgcactatgaagtgttgcctggtaaagagaaggtcgtctctgaactgaaacaactggctgaaaaagccgaccacatctatctcgcaaccgaccttgaccgcgaaggggaagccattgcatggcacctgcgggaagtgattgggggtgatgatgcgcgctatagccgagtggtgtttaacgaaattactaaaaacgcgatccgccaggcatttaacaaaccgggtgagctgaatattgatcgtgttaatgcccagcaggcgcgtcgctttatggaccgcgtggtggggtatatggttagcccgctgctatggaaaaagatcgctcgtggcctgtctgccggtcgtgtgcagagcgtggcggttcgcctggtggtcgagcgtgagcgtgaaattaaagcgttcgtgccggaagagttctgggaagtcgatgccagcacgaccacgccatctggtgaagcgttggcgttacaggtgactcatcagaacgacaaaccgttccgtccggtcaacaaagaacaaactcaggctgcggtaagtctgctggaaaaagcgcgctacagcgtgctggaacgtgaagacaaaccgacaaccagtaaacctggcgctccttttattacctctacgctgcaacaagctgccagcacccgtcttggatttggcgtgaaaaaaaccatgatgatggcgcagcgtttgtatgaagcaggctatatcacttacatgcgtaccgactccactaacctgagtcaggacgcggtaaatatggttcgcggttatatcagcgataattttggtaagaaatatctgccggaaagtccgaatcagtacgccagcaaagaaaacagtcaggaagcgcacgaagcgattcgtccttctgacgtcaatgtgatggcggaaagcctgaaggatatggaagcagatgcgcagaaactgtaccagttaatctggcgtcagttcgttgcctgccagatgaccccagcgaaatatgactccacgacgctgaccgttggtgcgggcgatttccgcctgaaagcacgcggtcgtattttgcgttttgatggctggacaaaagtgatgcctgcgttgcgtaaaggcgatgaagatcgcatcttaccagcagttaataaaggcgatgctctgacgctcgttgaacttacaccagcccagcactttaccaagccgccagcccgtttcagtgaagcaagcctggttaaagagctggaaaaacgcggtatcggtcgtccgtctacctatgcgagcatcattagcaccattcaggatcgtggctacgtgcgagtagaaaatcgtcgtttctatgcggaaaaaatgggcgaaatcgtcaccgatcgccttgaagaaaatttccgcgagttaatgaactacgactttaccgcgcagatggaaaacagcctcgaccaggtggcaaatcacgaagcagagtggaaagctgtactggatcacttcttcagcgatttcacccagcagttagataaagctgaaaaagatccggaagagggtggtatgcgcccgaaccagatggttctgaccagcattgactgcccgacttgtggtcgcaaaatggggattcgcacagcgagcaccggggtattccttggctgttctggctatgcgctgccgccgaaagagcgttgcaaaaccaccattaacctggtgccggaaaacgaagtgctgaacgtgctggaaggcgaagatgctgaaaccaacgcgctgcgcgcaaaacgtcgttgcccgaaatgcggcacggcgatggacagctatctcatcgatccgaaacgtaagttgcatgtctgtggtaataacccaacctgcgacggttacgagatcgaagagggcgaattccgcattaaaggttatgacggcccgatcgttgagtgtgaaaaatgtggctctgaaatgcacctgaaaatggggcgtttcggtaaatacatggcctgcaccaacgaagagtgtaaaaacacacgtaagattttacgtaacggcgaagtggcaccaccgaaagaagatccggtgccattacctgagctgccgtgcgaaaaaagtgatgcttatttcgtgctgcgtgacggtgctgccggtgtgttcctggctgccaacactttcccgaaaagccgtgaaacgcgtgcgccactggtggaagagctttatcgcttccgcgaccgtctgccggaaaaactgcgttatctggccgatgcgccacagcaggatccggaaggtaataagaccatggttcgctttagccgtaaaaccaaacagcaatatgtctctagcgaaaaagacggaaaggcgactggctggagtgcattttatgttgatggcaaatgggttgaaggaaaaaaataacctttaattctgtcaggtttttataaacaaagggtcgcgaaagcggcccttttttattgcatattattttttcttcacacctatacactaaggctataaatgatatagtggttatagttagcaccttttttattattaaatcgtattagtcacccgccaggtgtgacgaaaaaacgatgttctgatggcgtctaagtggatggtttaacatgaaattacaacaacttcgctatattgttgaggtggtcaatcataacctgaatgtcagtagtacagcggaaggactttacacaagtcaacccgggatcagtaaacaagtcagaatgctggaagacgagctaggcattcaaattttttcccgaagcggcaagcacctgacgcaggtaacgccagcagggcaagaaataattcgtatcgctcgcgaagtcctgagcaaagtcgatgccataaaaagcgttgccggagagcacacctggccggataaaggtagtctgtatatcgccaccacgcatacccaggcacgctacgcattaccaaacgtcatcaaaggctttattgagcgttatcctcgcgtttctttgcatatgcaccagggcagcccgacacaaattgctgatgccgtctctaaaggcaatgctgatttcgctatcgccacagaagcgctgcatctgtatgaagatttagtgatgttaccgtgctaccactggaatcgggctattgtagtcactccggatcacccgctggcaggcaaaaaagccattaccattgaagaactggcgcaatatccgttggtgacatataccttcggctttaccggacgtagtgaactggatactgcctttaatcgcgcagggttaacgccgcgtatcgttttcacggcaacggatgctgacgtcattaaaacttacgtccggttagggctgggggtaggggtcattgccagcatggcggtggatccggtcgccgatcccgaccttgtgcgtgttgatgctcacgatatcttcagccacagtacaaccaaaattggttttcgccgtagtactttcttgcgcagttatatgtatgatttcattcagcgttttgcaccgcatttaacgcgtgatgtcgttgatgcggctgtcgcattgcgctctaatgaagaaattgaggtcatgtttaaagatataaaactgccggaaaaataatttcttgcgttattttcggcaccttttatgtagcgaaggtgccggaatatattctcttttgttacttatttctataccgtgcacaatatttttatccctcatatttatagggtaaattacctgtaaagtagtgtctaattacccgcctcgcaaactccagttttcaaatatctatttcaggtcaaaagattgaattattcactggagacgattcgtaaattcgctggatttttgactaaagtttctttaggatttgtctcatcgtatgattaattacaccaatcgttcaacgtcttgctgataagtgatggcgattatatgaggttagcaatgccttctggaaatcaggaaccccgccgcgatcctgaattaaaacgtaaagcctggctggcggtttttcttggttctgcacttttctgggtggttgtcgcactgctgatttggaaagtgtggggataactatggtcggtcaggagcaactggagtcgtcaccattatgccagcatagtgacaatgaaacagaaacgaaacgggaatgttccgtcgttattccagacgactggcaactaacatcgcagcagcaagcctttatagaactgtttgctgaagatgatcagccgaaacaataattatcatcattcttattacccatttttaatgaattaaagggcttttaatacaccgcagcaataacagcttgagttatctcaacacaaaataataaccgttaagggtgtagcctatgatcaacacaaatatgaaatattggtcctggatgggcgcgttttctctgtcgatgctcttctgggccgaactcctctggatcattactcactgatccttgaccccgctgcggcggggttgtcatttgctttgccacaaggtttctcctcttttatcaatttgggttgttatcaaatcgttacgcgatgtttgtgttatctttaatattcaccctgaagagaatcagggcttcgcaaccctgtcattaaggaggagctatgagcagtaccctacgagaagccagtaaggacacgttgcaggccaaagataaaacttaccactactacagcctgccgcttgctgctaaaagtctgggcgatatcacccgtctacccaagagtctcaaagttttgctcgaaaacctgctgcgctggcaggatggtaacagcgttaccgaagaggatatccacgcgctggcaggatggctgaaaaatgcccatgctgaccgtgaaattgcctaccgcccggcaagggtgctgatgcaggactttaccggcgtacctgccgttgttgatctggcggcaatgcgcgaagcggttaaacgcctcggcggcgatactgcaaaggttaacccgctcagtccggtcgacctggtcattgaccacagcgtgaccgtcgatcgttttggtgatgatgaggcatttgaagaaaacgtacgcctggaaatggagcgcaaccacgaacgttatgtgttcctgaaatggggaaagcaagcgttcagtcggtttagcgtcgtgccgccaggcacaggcatttgccatcaggttaacctcgaatatctcggcaaagcagtgtggagtgaattgcaggacggtgaatggattgcttatccggatacactcgttggtactgacagccacaccaccatgatcaacggccttggcgtgctggggtggggcgttggtgggatcgaagcagaagccgcaatgttaggccagccggtttccatgcttatcccggatgtagtgggcttcaaacttaccggaaaattacgtgaaggtattaccgccacagacctggttctcactgttacccaaatgctgcgcaaacatggcgtggtggggaaattcgtcgaattttatggtgatggtctggatagtctaccgttggcggatcgcgccaccattgccaatatgagcccagaatatggtgccacctgtggcttcttcccaatcgatgctgtaaccctcgattacatgcgtttaagcgggcgcagcgaagatcaggtcgagttggtcgaaaaatatgccaaagcgcagggcatgtggcgtaacccgggcgatgaaccaatttttaccagtacgttagaactggatatgaatgacgttgaagcgagcctggcagggcctaaacgcccacaggatcgcgttgcactgcccgatgtaccaaaagcatttgccgccagtaacgaactggaagtgaatgccacgcataaagatcgccagccggtcgattatgttatgaacggacatcagtatcagttacctgatggcgctgtggtcattgctgcgataaccagctgcaccaacacctctaacccaagtgtgctgatggccgcaggcttgctggcgaaaaaagccgtaactctgggcctcaagcggcaaccatgggtcaaagcgagcctggcaccgggtagcaaagtcgtttctgattatctggcaaaagcgaaactgacaccgtatctcgacgaactggggtttaaccttgtgggatacggttgtaccacctgtattggtaactctgggccgctgcccgatcctatcgaaacggcaatcaaaaaaagcgatttaaccgtcggtgcggtgctgtccggcaaccgtaactttgaaggccgtatccatccgctggttaaaactaactggctggccagcccgccgctggtggttgcctatgcgctggcgggaaatatgaatatcaacctggcttctgagcctatcggccatgatcgcaaaggcgatccggtttatctgaaagatatctggccaagcgcacaagaaattgcccgtgcggtagaacaagtctccacagaaatgttccgcaaagagtacgcagaagtttttgaaggcacagcagagtggaagggaattaacgtcacacgatccgatacctacggttggcaggaggacagtacctatattcgcttaagccctttctttgatgaaatgcaggcaacaccagcaccagtggaagatattcacggtgcgcggatcctcgcaatgctgggggatagtgtcaccactgaccatatctctccggcgggcagtattaagcccgacagcccagcgggtcgatatctacaaggtcggggtgttgagcgaaaagactttaactcctacggtagccggcgtggtaaccatgaagtgatgatgcgcggcaccttcgccaatattcgcatccgtaatgaaatggtgcctggcgttgaaggggggatgacgcggcatttacctgacagcgacgtagtctctatttatgatgctgcgatgcgctataagcaggagcaaacgccgctggcggtgattgccgggaaagagtatggaagtggctccagtcgtgactgggcggcaaaaggtccgcgtctgcttggtattcgtgtggtgattgccgaaagctttgaacgaattcaccgtagcaatttaattggcatgggcatcctgccgctggaatttccgcaaggcgtaacgcgtaaaacgttagggctaaccggggaagagaagattgatattggcgatctgcaaaacctacaacccggcgcgacggttccggtgacgcttacgcgcgcggatggtagccaggaagtcgtaccctgccgttgtcgtatcgacaccgcgacggagttgacctactaccagaacgacggcattttgcattatgtcattcgtaatatgttgaagtaacaactatttgcttgccggttattttgcttccggcaagcaaatgaattacacaatgcaagagggttatttgttcagcaaatggcccattttctcggctttggtatcgagataatgttcgttattggggttacgacctacaatcaatggtacgcgttcaacaatattaatccctgcttcggtcagaatttcgacttttttcgggttattggttaacaagcggacttcattgacgccaaggagtttgaacatatcagcgcaaagagtgaagtcgcgctcatcagcggcgaagcctaactggtggttagcctctacggtatcgtaaccttgatcctgcagtgcgtaagcgcggattttattcagcagaccaatgttacgaccttcctgacggtgatacagcaaaataccacggccttcctcggcaatttgcgtcaatgccgcttcgagctggaagccacaatcgcagcgcaagctgaacagggcgtcaccggtcagacattcggaatggacgcgcgcaagtaccggggtatgcccggaaatatcgccatagactagcgcgacatgatcgtgtccggttgccagttcttcaaatcccaccatcaggaaatcgccccatggggttggcagtttggcttctgccacacgtttaagctgcatgaaattctccagataatgctggttctgtattggcttattttgccataacgagaaggggttcacctaatcacgacgcgtcgatcgttcacggaatggcacaaatctgtcaatttttcctggaactggcgttttcagttatgattgtgggacttatcaaaaaggagaggccatgcgtagcattgccagacgtaccgcagtgggagctgcactattgcttgtcatgccagtagccgtatggatttctggctggcgttggcaacctggagaacaaagttggctactaaaagcggctttttgggttactgaaactgtcacccagccctggggcgtcattacacatttgattttattcggctggtttctctggtgtctgcgttttcgcattaaggctgcctttgtattatttgccattctggcggccgcaatccttgtgggacaaggcgttaaatcctggatcaaagacaaagtccaggaaccacgaccttttgttatctggctggaaaaaacacatcatattccggttgatgagttctacactttaaagcgagcagaacgcggaaatctagtgaaagaacagttggctgaagagaaaaatatcccacaatatttgcgtagtcactggcagaaagagacggggtttgcctttccttccggtcacacgatgtttgctgccagttgggcactgctggccgttggtttgctgtggccgcgtcggcgaacgttaaccattgctatcttgctggtctgggcaacgggagtcatgggaagccgcctgctgctcgggatgcattggccacgcgatctggtagtagctacgttgattagctgggcgctggtggcggtggcaacgtggcttgcgcaacgaatttgtgggccattaacaccacctgcggaagaaaatcgcgaaatagcgcaacgagaacaagaaagttaacgctggttgattttccgaatttagcccttaaatcatcaacaatgcgtgtggatgccatttcgcagacggcgcgaaaatggtactttaaagggctattgcggtaagttgaccataatttattcgctctaaccacataacgggaagtaatgtgaaatatttactcattttcttactggtgttagcgatcttcgtgattagcgtcacgttgggtgcgcagaacgatcaacaggtgacgtttaattatctgttagcgcaaggggagtaccgtatttccacattgctggcggtattgtttgctgcggggtttgctatcggttggttgatttgtggcctgttctggctgcgagttcgtgtttccctggcgcgcgctgaacgtaaaataaagcgactggaaaaccagcttagtcccgcgactgacgtggctgtagtgccgcacagcagtgcggcgaaggaataactttctatgctggagttgttgtttctgcttttgcctgtagccgctgcctatggctggtatatgggccgcagaagtgcgcaacaaaacaagcaagatgaagccaaccgcttgagccgtgattacgtagcgggggttaacttcctgcttagtaatcaacaggataaagcggtagacctgtttctcgatatgcttaaagaggatacaggcaccgttgaagcccaccttacgctcggaaacctgttccgtagccgtggcgaagttgatcgcgctattcgcatccatcagaccctaatggaaagcgccagcctgacctatgaacagcgtctgttggcgattcaacaactggggcgtgattacatggccgccgggttatatgaccgcgcggaagacatgttcaatcagctgaccgatgaaactgacttccgcattggcgcgctgcaacagttgctacaaatctaccaggctaccagtgagtggcagaaagcaattgatgttgccgaacgcctggtgaagctgggtaaagataaacagcgcgtcgaaattgcccatttctactgtgagttagccctgcagcatatggccagcgacgatctcgatcgtgccatgaccttgctaaaaaaaggggcggcggcagataaaaacagcgcccgcgtatccataatgatgggacgcgtgtttatggcgaaaggagaatacgccaaagccgtcgaaagtctgcaacgcgtgatatcccaggacagagaactggtcagcgaaacgctggaaatgttgcaaacctgctatcagcagttgggtaaaactgccgaatgggcagaattcctgcagcgtgcggtggaagagaacaccggtgccgatgctgaattgatgcttgctgatatcatcgaagcgcgcgacggtagtgaggccgcacaggtctatattacgcgccagcttcagcgtcatccgaccatgcgtgtgttccataagttaatggattaccacttaaatgaagcggaagaagggcgtgccaaagagagcctgatggtgctgcgtgacatggttggcgagaaggtacgtagtaagcctcgttatcgttgccagaaatgtggttttaccgcatacaccctctactggcattgtccgtcttgtcgggcctggagtaccattaaaccgattcgcggtcttgatggcctgtaatttttaaaaaaaatccgactttagttacaacatactaattattaatgttccattgtgctccggcaacgacggcgcagaaaaagcctgccaggggagaaatcgcaactgttaattttttatttccacgggtagaatgctcgccgtttacctgtttcgcgccacttccggtgcccatcatcaagaaggtctggtcatgacgttaactgctagttcttcttcccgcgctgttacgaattctcctgtggttgttgcccttgattatcataatcgtgatgacgcgctggcctttgtcgacaagatcgacccacgcgattgtcgtctgaaggtcggcaaagagatgtttacattgtttgggccacagtttgtgcgcgaacttcaacagcgtggttttgatatctttcttgacctgaaattccacgatatccccaacactgcagcgcacgctgtcgctgctgcagctgacttaggcgtgtggatggtgaatgttcatgcctctggtggggcgcgtatgatgaccgcagcgcgtgaggcactggttccgtttggcaaagatgcaccgcttttgattgctgtgacagtgttgaccagcatggaagccagcgacctggtcgatcttggcatgacactgagtcctgcagattatgcagaacgtctggcggcactgacgcaaaaatgtggccttgatggtgtggtgtgttctgctcaggaagctgtgcgctttaaacaggtattcggtcaggagttcaaactggttacgccgggcattcgtccgcaggggagtgaagctggtgaccagcgccgcattatgacgccagaacaggcgttgagcgctggtgttgattatatggtgattggtcgcccggtaacgcaaagcgtagatccagcgcagacgctgaaagcgatcaacgcctctttacagcggagtgcatgatgagtgattccaacagccgtctggtctacagtacggaaaccggacgtattgatgagtccaaagcggcccctgtacgccctaaaggcgacggtgtggtgcgtattcagcgtcagaccagtggacgtaaaggtaagggcgtttgcctgattaccggtgtcgatctcgatgatgccgaactgacaaaacttgcagcggaactgaagaaaaaatgcggctgcggcggagcagttaaagatggagttattgaaatccagggcgataagcgtgatttattaaaaagtctacttgaagcgaaagggatgaaggtaaaactcgcaggcggttaacataaaaagccacggatatatccgtggctttcgaatattttactgtgcgtattattcagttatttcgtactgaacagaatcaagcgtattataattgcgagtcgataatcgacatttatttacgattatttaccgacctggtgaccaataacacctccgacagctgcaccacctaatgtacccaacgtactgccatcggtcagtactgcaccgcctaatgcccctgcacccgcgccgattgcggtgttgcggtcccgtttagaccagttagaacaggcactcagagacattgccaaagtaattgccagaacagccgcggtcatttttttgctcgttacaaacataatactctctcctgaatttatgattcacggaagtaagctctctataactataatagctaagaataagtctggtgaaattattccgtgaaatctgctcgcgcgcagggttatatcacgcaggtgataatgacttcctgttatatcgctgataataattttatatcttgagagtgttaataacaggtaaatagtcttaattatcaaccaggaatcatcttagagcggatgatttgccaaactgcaaatcatccgtagagaagggaaatggttaaatgtcaacgacgtgaatggtgagtttactgtgctcaagatgcatcagatcgctggcgcgtattttgctatcggtaatcacgcgattgaatcgctcaacgggaccgatggagtaactatgtacagcaccaaatttgctgctgtcagtcaggactatcgcttcgcactctttttccagcacggcattgaccacatcggtacgcatcatatcgcgaccggtaaatccagtttcaggttgccagccatcaataccaataaatgctttgctgaaatgcacctgttggatgcactggcgtgtcaaagggccaaccatactttcgctttttttctgatacacgccaccgagcaaaataacttcacaaggcgcgtctttcagcaaatgcgcgatgtagctgctgaccgtgatgatagtgacatttttcttctgctcgcccagagtccgggcgagtagggcattgctgctgccattttcgataaagatggtttcgcccggttgaaccaggctcgcggcaaactcggcgagttcacgcttcagcgtatagttgctcatcatacgggtttcgacgtcatcactatcaaggctaacagcaaagccatgtgcacggcggaggtaactcagtttttcgagtgtgttgagatcctggcgaatggtaacttcagaaactccagtggcttttgccagatcggttacgctaacctgaccctggtcaatgaccatctgtagaatagtttgttgtcgggaattcatcgctgtaattcttataacgttataatacttaataaaaaaatactgacgcgccgggcatcctcaaataggaaaacctgaaggcacgattgttaaatctcccacggtgccttcgggatgtctggcgtagattcagcaacctggcgcaagagttctgctttaagtatctcgagattatggatcgcagagtggtaatcgcctgccacaaggatatctaacacaatatcaatacgttcggcaacgcgctgggcatcaaattcagacatcaaggacatccttatagcaaaagggggaaaatgaataatgcaaaaattgccgctaaaagagaagtgtttaacagcaacggctaattatcatccaggaatacgatatataatgacgggatatagcgctaagtatatatattcatctacttatgcgcgcttcagatagcgtttataccagcgttcgaaggcgacggcgggcatcggtttggcaaacaaaaatccttgccgctcattgatcccgttcttggttaaaaaagcatcttcctttgcactctctacaccttcggcgatcacctgaagattcaatgcctgggccacagcgacgatcgcccggaccagactctggctgacaggttgtttgtgaatatctcgaacaaaaacctggtcaagtttgatggcatcgatcggaaagcgcgccagttggctaagactagagtagccggtaccaaaatcatccagatgcacttgcgcacctagttggctaaattgttgaataacagacagtgccagttcatcattctcaatcagacaactctctgtcagttcaacatctatagggcagtattcaaaattgagttcctggagaacctgtttcagggcggtgaaaatggtttgatcggcgagctgacgtgcagaaatatttaccgccactcgcaggtttatgcctttatcccgccactttgccacctggcgtacgacatcgagaatcacccaacggcctaaaggcacaattagcccactctcttcggcgtaggaaatgaagtccaacggtggaatcaacccacgttcaggactctgccaacgtactagtgcttccagactgcgcacttcgccacgccaggtgattttcggttgatagtgaataaccaactgatcgttttccagtgctttacgcaagttggtatccagccagagatattcaaatacccgttgattcatttctggggtaaaaacgcaaaattgtcctcgtccgccttccttcgctgtgtacattgctgtgtcggcgtgacgaataatagccgtgctgtcactaccatgttcgggagagagtgcaatacctacactacagctggtataaacttcaattaaaccaatgcgaaaggggagccgtaagcgggtcaaaattcgacttgccattgcttccagcgcgctttgactggtgttggatgccagtaccagaaactcatccccacctggacgagccaacacctggtcatgttcgagacagcttaaaatagccaaactcacgtcgcgtaataactggtcaccaaacaaatgcccataggcgtcgttgacctttttgaaattatccaaatcaagatacacaaccccaactttattgttatctgcatgattaatagcgtgatcgattaaatcctgcattgcgttacgattcggcagtccggtgatactgtcggtatttgccagaatacgcagtcgctcctgagcgcggcgctcttcggtaatgtcggtgccggaacagattaaaaaaatctcgtttttgccactgccgctgtggacaaatttattgcgaaacagaaacagccgctggcctttacatgttggtatccacagttcgacttcatatgcattgccgcttcgaaaaaatacacggttattgcgcctggatgccgcagcttcacgacggctcataaacagtttaaacacgctttgcccaatgacgtcgtgttctttcaaccctgtgtaatcttcacataaccgattgaagcgttggatattcccccggctgtcgagaatcactattgcggaatgtgcttcagaaactacctgctcagcaaaggaaagcccgtgacttaaatcacgagcaaccgccggtgtgtcatgccatgcagacgcgttgccagcccattcccgtttattgatttttcgtcctaccagatgcacagaaagatcgctttcatcgacggtcagactcatcatcaggctggaggtgatgaccgtcatttccctgatgcgagcagcctgttcggcagataactgcaatgtacgatcaggttctgtggtttcggtggtagaaaagcgcaaaacatcgctgctttccgtcaaccgccagtatggattgtggcttccgagaaagttgtacaacgttgtggactccctaacggttttcatgatgcatatcctccggttaacagcggagtccgcggttaaataaaaggaacaacatgacttacatgaaattaacggcggctaaacgcattgttttttttatatatttatttgtaatccagttttggaaaaacgccagttttcaaacgaaagtcagttaaaaaatctgcctggatataacgaaggtagagcggggaaataaacggcccatccatgaggaatgggccgtgaaaggagattacgcgaccgggcgcgcaataatgctgcgggtttccatgcggacttcggcaatagtgacgtcaataacgtcagtcactttgtaaaccgtttcacctttaatttgtacagtgccgttttcctggctgcaaaccagttcatcgcgcacagcgtgtaagaaaggtgccggaataaaggcgatagcgccgttatcaaccaaacgaacacgcatgccgccacggctgatatcgacaatttccgctgcgaaacgggtgtcggtcccggctttgtctttcaggaagcgtgcgtataaccagtcaccaacatcacgttctgccatccggttgagacggcgacgctcggccatttggacagtgatttcatcctgtgggcgcgtcgcagtttcgcctttgataaccgctttcagcagacggtggttgatcatgtcgccatatttacggatcgggctagtccaggtggcgtatgcttccagaccgaggccaaagtgaggaccgggttcagtgctaatttcagcaaaactctggaagcgacgaatgcggctgtcgaggaaaccagttggttgcgcgtccagttcacgacgcagtttgcagaaaccgtccagcgtgagcacttcttcggcatcgacatgcagaccgtgcgttttcagcaacgctgccagcgcgtcggcattcgccggatcaaagcccatatgcacgttatagatgccaaaaccgagcttatcgcgcagtacgcgggccgcacaaatgttagcggcaatcatcgcttcttcgacgatacggttggcaatgcgacgaggctcggcgacgatatccagcacttcacctttttcaccgagaataaagcggtaatccgggcgatctttaaacaccagtgcgtggttatgacgccactcgccgcggcgttggcaaatttgcgctagcaaacggacttgttcggcaattgcttcactttcaggctgccagtcaccggtattttccagccagtcagaaacctggtcatacaccagctttgctttggattcgatggtggcggcaaagaattcgatattatcttcaatggtgccatcagcggagagcgtcatgcggcatgccagtaccgggcggacttcattggcgcgcagactgcagagatcgtcagaaagctcgcgaggcagcatagggatgttgaagccaggcagatagttggtgaatgcgcgaattttcgcggctttgtccagcttgctgccttcagcaatccacgcggttggatcggcaatcgccacaatcagctgaagtttgtcatccggcaacgccttagcgaaaagggcgtcatccatatcttctgtgctggcactgtcgatggtgacaaaatccagcgcggtcagatcttcacgaaccagaccttcatcgagcatttcggtagcgacgccgtctggtgcttctttttccagattatggcgtgcaagggtaacccaccacggtacaaagtgatcgtcaccaaaagtgatgtattgtgtcagttctgcatagaaagaacgatcgcctttcagcggatgacggcgcatttcggcaaccgcccagtcgccttctttaaactcgtggttcaggccacgggctgcgcggcaaggaatggcgtcttttaagagtggatgatcaggaacgatggccagacggtcatttttgccctgaaccttacccacgaaacgagtcaggaacggttcaaccagttcttctggctctgcggattcacgttctttttcactgtggatcaccgcgataattcggtcgccatgcatgacttttttcatctgcggcggcggaatgaaataacttttttgcgcgtcgacttccaggaagccaaagcctttttctgtggcttttaccaccccttcagcgcgtggcgtctgggaatgcagttgctgtttaagctgcgctagcagcgggttgtcctgaaacataattgtctattttggtggccattagagcggctgacagttttacgcgaatctgtctgacgcggcaaggttaatatgtctcacccaacgcgatttttaagcgatttatccagccacacagcccgctccataccagcagattaataatctgcgtactacttttttcgtgttcgagtaaagggctgaactgggcggcgctaaagcgatcgggtgctcgggtcagccattgtatcgcctgaacggtagcgcgctcaacagaatgacggtcagcccattggttaatttcattttcgcccttgcgcataagggtgctgatttttttatattcattactactatccatacaggtggcaaaacaagcaggactgccatttatacgcgcgcataacaacgccgcaagctgattatccggctgtgtattgccccgtgtgctgtttaacaacttttcgagaagggaaagactaatagggtggagagagagtatttcggccagttggcaaagttctgcagtactactttttgtgtgctcttcaggtagtttttccacctcatagctgcttcgccagcgtaaactttcatcagcaaacagactcgcgtcggcgtagttttgtatctccagcccgggtaaccagcgtaccggatgcccgagataagcctgaaatgtcgcaattgtccgcgcctgaaagccaataaaaccaatgatttggctaatgatcacacagtcccaggcagtaagaccgacgtcattcagatgctggcggcttcggttgtcgataatagaagggctgctagccagttggcgggcatattgcgtgatttgtgccaaccgatgattactttccctggtggaatcaggcccggggagcggcgtaagtcgcgcgctatagtagttacataaccgctggacgccgcaaacctgagcaaccgtcagggccgtgctcaagcgttcataagcggtgaaggtctgactacgggtcacggtaagctggtcagggaacaaatccactgcaagaacacgcgcagggtccagccaactaaggaagggggccagcgtttctttttcaaggatcacgtcgagtagaaagggatcgctgacctttgcggcttccgggaccagaggcagaacgtcatactccgtagtactggattgcgtttcatgataccagtggcttttgccggtgatgtggcgttgttccatgggcgctccttggtcgtaaaggaaatcgttatcctgacgcaaggcgggaaggggagaaagacggatcggcgataacaaatatcagaaaggtataacagagataacgggcggcagaacgccgcccatctttaccaacagaacgattatttcagttcgagttcgttcattgcagcaatgctgaaaccgccgtcaacgtggaccacttcaccggagataccggcagagagatcggagcacaggaatgccgcagagttacccacatcttcaatagtaacggtacggcgaatcggggtaacggcttcgcaatgagccagcattttgcggaagtctttgataccggaggccgccagagtacggatcggaccagcagagatggcgttaacacgcacaccttccggacccatcgcgttcgccatatagcgcacgttcgcttccagagacgcttttgccagacccataacgttgtagttcgggatagcgcgctcagcgccaaggtaggaaagggtcagcagggcagaacccggattcagcatggagcggcaagcttttgccattgcaacgaagctgtaggagctgatgtcgtgggcaattttgaagccttcacgggtaacggcgttaacatagtcaccatccagctgatcgccaggtgcaaaaccaatagagtgtacgaaaccgtcaaatttcggccaaactttccccagttcagcgaacatggtgtcgatgctggcatcttctgcaacatcgcactgcagaacgatgtcagaacccaattgagcggcaaattcttctacgcggcctttcagtttgtcgttctggtaggtgaatgccagttcagctccttcgcggtgcatcgcctgagcgataccgtaggcgatggatagtttgctggcaacaccggttaccagaatgcgcttaccggaaagaaaacccatagctttaatccttattgttgatgcttgttgtgcctgaaaatcaggcgattcgtcgttttagtaaacagtacgaacagataaacggttattataatcaacctggctgtgagtagctatagttgccaggtccgaccggagcaggctgcggcagggggggcgcttttcccctcaccctaaccctctccccagaggggcgaggggaccgtattgtgcaaatattgttaccccagcaacaaacaggctcatacagcccctaaccctttcatggcgatggctgggacggttcagaccttgccgaatattctccagcaccgtctccatgttttcaccacaacagctattcggctcggtctgccccctcgctctttcagggagagggactccggcggttcagttcctgcagaatattctccagcaccgtctcctcattacaatcaatctcgttattccagaaacgcagcacggtccagccctggctctcaagccagctagtgcgcctggaatcataggcaactgctaaatcatgctgcccaccatccagctcaacgactacacgcgcgctgcagcaagcaaaatcgagaatgtagctccccactggatgttgacggcgaaatttgaaatcactaaaacgtcggctgcgaagatatcgccagagctttcgttcctgcaaagtgagattgcgtcttaaatcacgcgcattacttttaattttatctatcacctcattctgacaagatttaatcttttgtcagaatgaggtgaataatctggaaggaggattcagaaaattagcgatctttacgccacgcatccgccgtcaatgcctcgccaaaatgaccggcaatcagccgtttggtgagttcatgcagcgggcttgccagcacatccgcggtgctgcctcgctcgacaacctcgccctgatgcatcaccagcacctggtcgctaatgtgcttcatcattccgatatgctgggtaacataaatatagctaatgccctgtttttcctgtaattccagcatcagattaatcaactggctacgcatgctcatatccagactagcgagggcttcatcggcaataatgacttttgggcgcaatatcagcgcgcgcgccagacccagacgctgtttttgtccgggtgccaacatatgcggatagtaactgacgtgatccggtagcagcccaaccatacgcatcgtttcaataatctgtttgcgacgctgttccggttccaggtcggtgttcaggcgcagtggaaaatccagaatttggctgatacgttgacggggattcaagctggtgctaggatcctgaaaaatcatgcgaatacgctgactgcggaaggaataatcgccaaaatgcagtggatgatcgtcaatcaataactcgccgctggtaggctctatcattcccgccagcatttttgccagcgtggatttaccgctaccattctcgccaataatcgccagtgtctggccttcacgtagcgtaaagctcaagggttttaccgcttctacggtctgacgacgaaaccagccggtccggtagcggaacgttttacttaaattacgcacttcaagcagcgtttcgatcatctcactctttctccatgttcagcgggaaatgacaggcatagagatgatttttcgcccccgtcaaacgtggcgtcacaatgcattctcgttgtgcatacgggcaacgtggccccagacgacaaccaatcggtaactgttccagcagtgggatagcgccgggcagcgtattgaggcgacttttatgcggcatcgcgctgccgaagtctggtatcgcgcggatcagcgcctgggtataaggatgatgtggcatcgtcaccaactccttactcggcgcggtttccactgtttgaccgcagtaaagcacgttaattttatccgcccattggctaagcatttgtaagtcatggctgataagcaaaatagtggtattgctgttttggttgagacgcgtcagcaggcgaaagatttgcgcctgggttgttggctccatactgttggtcggttcgtcagcaatcagcagacgcggttgattcgccagtgcaatggctatcatcactttctgacattcaccttcggtcaactcatagggaaaactgcgcatcgcatctttgtgatctttaatccccacgcggtgcagcagttcaatggcacggcgtttgcgccagccaaaacgctgccaccaacggcctttataggtccaggctgggatgttttgcatcaactggcggcccacacgttcactagggtcaagacagctctgcggttcctggaaaatcatgctcacgttatggccaaccagtttgcgccgttcgcgtgcggagagacgcagcaaatcgatatcatcaaaacgcatacggtcagcagtaacacgccagttatctttattcaccccacaaatcgctttcgcaatcaaactcttgccggaaccggattcaccaacaagaccgcggatttcaccttcggttaaggtcatacttacccggtcgacggctttaacccactcatcaccggttttaaattcaatggtcaggttacgaatatcgagtaatggcattattccacccccgcaataatcgcacgacgaacgccatcgccaaggaggttaaccaacaacacgctaatcataattgccgcacctggcagcatgacagtccacggggcgacataaatcagttccagcgcatcaccgagcatcgctccccattcagggctggggagttgtgcgccgagatcgagaaagcccagcgcggcgatatcgagaattgccatgctcagtgcgcgggtgatctcggtgaccagcccggcggtgatgtttggcatcacagcaaaccagagaatattcagcgtacttgcgccatccagacgggcggcgataacgtactctttttccagttcgtcatgcaccatgctgtaaatgctacgtaccatacgcggcagcaatgccagccagacagcaaacatagcgtgggacaaactcggtccggcaaacgctacaacgataattgccaacagcaggctagggatcgccagtaaggtatccagaatatggttaagcaccgcactgcggaggccgtgtgtcgccccggcgaaggtgcccagtaccaggccacagatcgtcgcggcaagcgtcaccacaaatgcgccacccacggttggcgcagctccgctcagtaaacggcttaaaacatcgcgtccgaggtcgtcagtccccaggaagaaagaaacttcgccatagcggctccaactcggcggcaataattgataaccgagaaattgctggtcgatgccgtaaggcgcaaaccagccgccaaaaatacacagtacagccagccccgcgcagccgtacaggccgaccatcgcagaggcgtcactataaaatttgcgccaggcggtacgcagcgtgcccggcgggcgcttttcgctgtatacgctatcgtaaggcataccattccttatgtttcagattatttatcgtaaggcataccattccttatgtttcagagggttagccatggcacccaaaatatcagaaatcacgttaacaataatgaccagactgccacacaccatcactccggcggaaatggctgcgtaatcctgctggcggatggcgttaattaaccagcgccctaaacccggccagctaaaaaccatttcggtgatcatcgccagcgtcagcatggtggaaaactgtaagcccaggcgaggaataaccggcggtaacgcgttatgcagaacgtggcgacgcaaaatagtaaagcggctcaaaccgcgggtcgccgccgcttttacatagttctggtcatacacttcgatagtgctgatacgcatcaggcggatcacttcagttgttggcgcaacgctcagggtgatcacgggcaatatcatatggcggattgcgctcatgatcatttcatcccgccatggactgtcgctaagccaggcatcaatcaacgcaaaaccggtaatcggtttcacttcgtagagcagatcgaaacgcccactaacgggcaaccaacctagcgtgagactacaaaacagcgtcaacagaagcgccagccagaacaccgggatactaaagcccagtaaggcgatggcgttgatcaagttatcctgccacttatggcgcgtaatcccggcaatcatccccacggggatgccaacaatcagcgcaaaaccgaaggcgaggatgcacagttccatcgtcgccgggaagacctcttttaactgttcggcaatcggttgaccgttaatgctggaaacaccaaaatcccagtggatcaggccgttaaaccagaacacccaggcattccacagactcgcgccttgtaacggcgcatgaggggtgaaatagctcaagctgaagccaacgaaggtcagcaggaacaaggtgacaatcaataacaaaatgcggcgtaaggtgaagataatcatggttttttcacctcatcctgtttctcgcgatacaccccagcaaaggaggcgttaccaaacgggctaagtaccagacctttgatatcgtaccgataggcctgcaaacgcaaactgctcgccagcggcaaaatgggcaattcctgcgccagaatactctgcgcttcgtcataggcttcaatacgcgccgccagctgctggctagagagcgccttacgcaatacgctgtcgaatttcggatcgcaccagtgggcgaggttggtctggctatgaattgccgcgcagctcagtaacggacggaagaaactgtccgggtcgttactgtccgtcgcccaaccggataacgtcagatcatggctcatatccatcaaccgcgcctcctgaaagcgaccttctaccggcacaatcaccacttttacgccaacctgcgccatatccgcctgaatcagttcggcagttttcagtggactggggttccacgcctggctacgtgtgggcacccacagtttcagcgttaaattttccagccccaagctcttcaactgttcgcggcttttcgccggattgtattcagtaattttagcctcgttgtcataggcccagctggcgcgcggtaaaatagaggccgccgtttcagccgtaccataatagatggattgcatcaggcgctggttattaatcgccagtgccagcgcatggcggacagcgggattatttagcggcggtttggcggtgttaaatgccagataggcgacgttcatcccaggacgcagcgttaaacgcaagcgcgggtcgtcacgcaaaatggatagctggctggcagcaggccaggccagaacgtcgcattccccggtcaggagtttgctcagacgtccggtgccgccggagcctaaatccaccactacctgcggcattaacggtttaccgcgccagaagtcatcatgacgttgtaggcgaataaattgcccggcgcggtattcgctcaactgatacggaccggtgccgaccggttgacggtcgagttgctcctggcgatcttctttctctaacttccgggcatattctgcgctcatgacgctagcataatgggttgcgaggtgccacaaaaaagaagcatccggctgggcgagtcggaactcaacggtatgattatccagtttgcggacgcttttcacgttatcggcaaattgcaggctgtcgaagtaggggaagttgctgccgttgacgttatgccacgggttgttgcggtcaaaaattcgctggaaggtaaacaccacatcgtcggcattcattttacgagtgggagtaaaccagtcggttttttgaaacggaacatcgcgacgcaggtggaagcgataggtcgcgccgttgtcgagtacttcccagctttcggcaagttccggcatcaggcgataggtatagggatcgacatccagcagtcgatcataaaactgggcggcaagggtatcgacaattaacccactgctcgctttggatgggttaaaggtgttgacttgcccgctgacgcaatagacaaaaccgctgtcgcggatatcagcatgcgggggagattcaggcgcggcgattgcctgaccactcacaagtccagcaatcaccaaaagagagcttaatacctggcgcataatattaagggattttatgtaaagaggctatcttactaatatttaatgacatttgccattaccgtttgtgttcaggggtcgtaatgagggccgtgtggttggtcgttgaacaggtgacgtcgccatctgttcaacattcgtacccgtgatttctctataactataactcacagaacaacttagcgaggagcagagcggtacgatcgtgagaaacccattaaagcacgctgcagtgcgtgtcattgttagccagatgcggcgtgaacgctttatccggacaacgatactgaccgatcgtctgcaattaaatcattactcattaccccattgattcaaaaactctgcgatctcatcaatgcgtacgggattaatccccgcttcagcagccatttcatgttgggcttcttcgctgatctcttcattgttcatcaaacgggtgagcagtaactggaagtagtgggccagcggtgtgcgttcagcctctgcgacaggctctgcgcattcggtcgcgtactcatcggcaatatcaaaatattttagcgggatatcgtggttcattatttgcccctggggttaatgcgctaagcataagggcggatgatagcactcgtgatccgggtcatacatctttttatagttaatggcgcggcgcgttaccctcaggcaggataatgcgccgcgcatccgactattacgtttcactcaccggcgttctgtcaccatcatacaacggcactttgcgatagcggcggatcagataccataaatatgcgccgcctaagctagcccataccagaccgagtgtcagactcgtactctcgaggttaacccacagcacacccaccgtcagcgcgccaaccagcggcatcagcaaatagtggaagtgatccttccagcttttattcattcctttacgccgccagaaatgattaaacacgctcagattcacgaaggtaaacgccaccagagcaccgaagttaattaacgctgtggcggtaactaaatcgaagaacagcgcgctcaacgcgacaatcccgaccataatgacgttgagtgccggagtccgccattttgggtgcacatagccaaacacgcgctccggaaacacattgtcacgccccatcacatacagcagacggctcacgctggcatgactagccaggccagaggctaacgtgttcacaaacgtggtgcagaggaaaatgctctggaagagcttgccgccgacgtacagcgcaatttcaggcagtgcggcatccggatctttaaagcggctgatatcgggaaagaacagctgcataaagaagctcgccgcgataaagataacgccaccgtagaccgccgtcaggaagatggctttcgggatcacgcgtgcggcgtccggcgtctcttcgctaagcgtggtcaccgcatcgaaaccgaggaaggagaaacagacaatcgtcgccccggtaataatcgggatcaggtgcgcgttctcgctgataaacggctgaagactccagacggtgccaacgccttctcctttatgcagtccctgaactaccaggaagataaacaccaccatgatggagatttgcaccagtacaaacagggtattgaagttagcgaccaggttgacgctcttcagattcgcggcggttaaaatggcgacgaaggttaccacccacacccacggcggcacttccgggaagagggcggagagatagattttcgccaacaagacgttaatcatcggcaaaaagagataatccagcaggctactccagccgaccataaatccgacgtgcgggttaatgctcttttgcgcgtaggtataggcgctaccggcctccggaaactggcgaaccagtttgccgtagctgatagcggtaaacagcacacccgccagcgccagcaaataggacgccggaacgtgaccgtcgctaatgccggagacaataccaaaagtatcaaatacggtcatcggcgtgagataggccagacccatcatcaccacctgccacaatttcagactttttcgcagacgggttttgccgggttgcgcagcaatattcagtggactattaatagccataattgctgcctcccctgcgtaataaggtttgcggtcgtgtcgacctgaaatcaaacctgtttagcaagggaagcaaagggggcggagtccagtcagtagcaggaggggcgcatacgcagcctccctcgccatgcggggatttaatcatcggcatcatctcatttcctcgtcacagtcttaatcgttaacggaagcccgttgccgcccgcgctccataacgcgacatccgggaaatgtctggattaccagcaaatgtcaggcctggctccgctcaggccgatgaaacaaccccgcaaggggtattacgcgtttttcaacatccactcaatttctgtttctgtgatgaggcgctcaaactgcaacagctcatcatttttacaggcgtgatagacatggcagaagcgttcgcctaaatagcggcgcaggtgatcattctcgataaactcacccagggcatcgctctggcgaatcggaaagggtaagccttcctgttccagcccgttgccttcgacttcttcctgcaacggcagctcgttatcaaggccatgcaaaataccggcaaaaatcgctgccatcaccagatatgggttggcatcggcacccgccacgcgatattccacgcggtgattatgacggtcgccgcacggaatacgcagggcgacggtgcggttgttatggccccagctcgcctgcgtcggcacatacattcccggctggaagcggcgatagctgttcacgtttggtgccagcaacgccatgctgctcggcatcaggtcaatcatcccggcgagcatctttttcagcagcgggctatcttcgccttccgcgtcagaaagcacgttctcgccacgattattttgcatactgatatggatatgcattccgctgcccgcgtgctcttcatacggcttcgccataaaagtggcgtgcatcttatgcttttctgccatcagacgcaccaggcgttttagtgccagcgcatcatcgcaggcttccagcacgttatcagtatggtaaaggttgatttcaaactgacccgggctggcctcagcgaccgcgccatctgccggaatcagctgtaactgcgccagttcatcaatatcattgagcacgtcggcgaagtggttgaggttatcaacggagtaaacctggctttgtgtattgcggtcatcggtgccaggcgcgcagggcggttgcagatacccttcagcgtcgcgctggcgatccagtaaatagaactccagctctaccgctacgaccgggaacaatccgcgctggcgcagctgctgccacaggcggttaagaacgttccgcggctcaacgtcaaagggagcgccatcttcatcgaccatggtcaggagcatctgaccgataaactctggatcggcggcagaaggagttaaggaaccgagaacaggaacacaggtacgatccggctcgcccatttcctgacccagacctgcttcttctactacgttgcccagaatatccattgcaaatacgctggccgggaaataacaccctttctcgagcttcttcaggctactaacaggaatacgctttccacggaagcaaccatttaaatcggtaagtaaaacatcaacatattgcgtattcgggtagcgctccaggtagcgtttcacttcctgcgtaaaggcgctaccccgcctctcttcactctgctgaacaaagttctctacttcaacgatattggtttccatgattcttcgcctttggtttgttttccgctcgttatcaaagcgtaaaatataatgaccaccattcgaatctgtatgcaaactaaatgtttgtcaaatgttaaattgagtttgcaaaaatgaaaacccactgctagattgaaaaaatattgaacataaaggtcatttaaagcgcagtaatggcgataatttagtccactttgtgagattgagcatggaaaatataatgaacaatccggttatcggtgtcgtaatgtgcaggaacaggcttaagggtcatgcgacccagactctgcaagaaaagtacctgaatgccatcatccatgcaggcggcttgcctattgcgctaccacatgcgctggcggaaccgagtttacttgaacaacttttgccgaaactcgatggcatttatcttcctggtagtcccagcaatgtgcagccgcacctatatggtgaaaacggcgatgagcctgacgccgatcccgggcgtgatcttctgagcatggcgataattaatgccgcactcgaaaggcgcatccccattttcgccatctgccggggtttacaagaactggtggtggcaaccggtggtagcttgcatcgcaagctgtgcgaacagcctgaattgctggaacatcgggaagatcccgaactgccggtggaacagcaatatgcaccgagccatgaagttcaggttgaagaggggggattactgtctgcgttgttacctgaatgtagcaacttttgggtaaactctctacatggacaaggggcgaaggtcgttagcccacggttgcgtgttgaagctcgcagcccggatggcttagttgaggcggttagcgtcatcaatcatccttttgcgctgggcgtacagtggcacccggaatggaacagtagcgagtacgcgcttagccgtatattgttcgagggctttatcaccgcttgtcagcaccatatcgctgaaaaacagcgactctgaccactacagtttaaggaaatgcaaatatgagtgatgagggactggcgccaggaaaacgcttgagcgaaatccgccagcagcaggggcttagtcaacgtcgtgccgccgaactctccgggctgactcacagtgctatcagtacgatagaacaagataaagtcagccctgccatcagtacgctgcaaaagctgctgaaggtgtatggtctgagtctcagcgaattcttttccgagccggaaaaacctgatgagccgcaggtcgtcattaatcaggacgacttaattgagatgggtagtcagggtgtgagtatgaagctggttcataacggtaacccgaatcgcacgctggcgatgatctttgaaacgtaccagccgggcacaaccactggggaaagaattaagcatcagggtgaggaaataggcactgtactggaaggtgaaattgttctgacgattaatggtcaggattaccacctcgtcgcggggcaaagttatgccattaataccggcatcccgcacagtttcagtaatacgagcgcaggtatttgccgaattatcagcgcccatacgcccaccacgttttaatctttttgttctgtaagccgggtaagcgcaatgcgcccggcaatctatacacaaaatcattcaagttgcatcaaggcggcaagtgagcgaatcccgatgagcttactcaggtaagtgattcgggggagcgaacgcagccaaggcagaggcggcttgaaggatgaagtgtatataaagaatgtcgccagaaataaacgggcatacggcccggggatctctgcgccctgacgttcacaaactgcatatatctgatagacgtgaaacaggagtcataatgaattttcatcatctggcttactggcaggataaagcgttaagtctcgccattgaaaaccgcttatttattaacggtgaatatactgctgcggcggaaaatgaaacctttgaaaccgttgatccggtcacccaggcaccgctggcgaaaattgcccgcggcaagagcgtcgatatcgaccgtgcgatgagcgcagcacgcggcgtatttgaacgcggcgactggagtctctcttctccggctaaacgtaaagcggtactgaataaactcgccgatttaatggaagcccacgccgaagagctggcactgctggaaactctcgacaccggcaaaccgattcgtcacagtctgcgtgatgatattcccggcgcggcgcgcgccattcgctggtacgccgaagcgatcgacaaagtgtatggcgaagtggcgaccaccagtagccatgagctggcgatgatcgtgcgtgaaccggtcggcgtgattgccgccatcgtgccgtggaacttcccgctgttgctgacttgctggaaactcggcccggcgctggcggcgggaaacagcgtgattctaaaaccgtctgaaaaaagtccgctcagtgcgattcgtctcgcggggctggcgaaagaagcaggcttgccggatggtgtgttgaacgtggtgacgggttttggtcatgaagccgggcaggcgctgagccgtcataacgatatcgacgccattgcctttaccggtagtacccgtaccgggaaacagctgctgaaagatgcgggcgacagcaacatgaaacgcgtctggctggaagcgggcggcaaaagcgccaacatcgttttcgctgactgcccggatttgcaacaggcggcaagcgccaccgcagcaggcattttctacaaccagggacaggtgtgcatcgccggaacgcgcctgttgctggaagagagcatcgccgatgaattcttagccctgttaaaacagcaggcgcaaaactggcagccgggccatccacttgatcccgcaaccaccatgggcaccttaatcgactgcgcccacgccgacagcgtccatagctttattcgggaaggcgaaagcaaagggcaactgttgttggatggccgtaacgccgggctggctgccgccatcggcccgaccatctttgtggatgtggacccgaatgcgtccttaagtcgcgaagagattttcggtccggtgctggtggtcacgcgtttcacaagtgaagaacaggcgctacagcttgccaacgacagccagtacggccttggcgcggcggtatggacgcgcgacctctcccgcgcgcaccgcatgagccgacgcctgaaagccggttccgtcttcgtcaataactacaacgacggcgatatgaccgtgccgtttggcggctataagcagagcggcaacggtcgcgacaaatccctgcatgcccttgaaaaattcactgaactgaaaaccatctggataagcctggaggcctgaaatgaccgaacataccagcagttactacgccgccagtgcgaataaatatgcaccattcgacacgctgaatgagagtatcacctgcgacgtttgcgtggttggcggcggctataccgggctctcctccgcgctgcatctggcggaagcgggctttgacgtagtggttctcgaagccagtcgcatcggctttggcgcaagcgggcgcaatggcggacagcttgtgaactcctacagccgcgacatcgacgtgatcgaaaaaagctacggcatggacaccgcccgtatgctcggcagcatgatgttcgaaggtggtgagatcatccgcgaacgtatcaaacgttatcagattgactgcgactaccgccccggcggcctgtttgtggcgatgaatgataaacagctcgccacacttgaagagcagaaagagaactgggaacgctacggcaataaacagctggaattgctggacgccaacgccattcgccgtgaagtagccagcgatcgctataccggtgcgctgctggatcacagcggtgggcatattcatccgctaaaccttgccattggcgaagcggacgccatccgcctcaacggcgggcgcgtgtatgaactttctgccgtgacgcagatccagcacaccacgccagccgttgtgcgaactgccaaaggtcaggtgacggcgaagtatgtgattgtcgccgggaatgcgtatctgggcgataaagtagagccggaactggcgaaacgcagcatgccgtgcggcacgcaggtgatcaccaccgaacggctgagcgaagatttagcccgtagcctgatcccgaaaaactactgtgtggaagactgtaactatctgcttgattactaccgtcttaccgccgacaaccgcctgctgtacggcggcggcgtggtctacggcgcgcgcgacccggatgacgttgagcgccttgtggtgccgaaactgctgaaaaccttcccgcagctgaagggcgtgaaaattgattaccgctggacgggcaacttcctgctgaccctgagccgtatgccgcagtttggtcgcctcgataccaacatctattacatgcagggctacagcggccacggcgtgacctgtactcatctagccggacgtttgattgccgaactgctgcgcggcgacgccgaacgtttcgatgccttcgccaatctgccgcattacccgttccccggcgggcgcacgctgcgtgtgccgtttaccgcgatgggcgcggcgtattacagcctgcgcgatcgtctgggcgtttaatttccgattaaccgtgaagagtcaaaaggtgtgaaacatgagcaacaatgaattccatcagcgtcgtctttctgccactccgcgcggggttggcgtgatgtgtaacttcttcgcccagagcgctgaaaacgccacgctgaaggatgttgagggcaacgagtacatcgatttcgccgcaggcattgcggtgctgaataccggacatcgccaccctgatctggtcgcggcggtggagcagcaactgcaacagtttacccacaccgcgtatcagattgtgccgtatgaaagctacgtcaccctggcggagaaaatcaacgcccttgccccggtgagcgggcaggccaaaaccgcgttcttcaccaccggtgcggaagcggtggaaaacgcggtgaaaattgctcgcgcccataccggacgccctggcgtgattgcgtttagcggcggctttcacggtcgtacgtatatgaccatggcgctgaccggaaaagttgcgccgtacaaaatcggcttcggcccgttccctggtagcgtgtatcacgtaccttatccgagtgatttacacggcattagtacacaggactccctcgacgccatcgaacgcttgtttaaaagtgacatcgaagcgaagcaggtggcggcgattattttcgaaccggtgcagggcgagggcggtttcaacgttgcgccaaaagagctggttgccgctattcgccgcctgtgcgacgagcacggtattgtgatgattgctgatgaagtgcaaagcggctttgcgcgtaccggtaagctgtttgccatggatcattacgccgataagccggatttaatgacgatggcgaaaagcctcgcgggcgggatgccgcttagcggcgtggtcggtaacgcgaatattatggacgcacccgcgccgggcgggcttggcggcacctacgccggtaacccgctggcggtggctgccgcgcacgcggtgctcaacattatcgacaaagaaagtctctgcgaacgcgcgaatcaactgggccagcgtctcaaaaacacgttgattgatgccaaagaaagcgttccggccattgctgcggtacgcggcctggggagcatgattgcggtagagtttaacgatccgcaaacgggcgagccgagtgcggcgattgcacagaaaatccagcaacgcgcgctggcgcaggggctgctcctgctgacctgtggcgcatacggcaacgtgattcgcttcctgtatccgctgaccatcccggatgcgcaattcgatgcggcaatgaaaattttgcaggatgcgctgagcgattaatagcccaacgcaataatgtctgatgcgctgcgcttatcaggcctgcaaacgacgtattgattatgtatgccgaataaagcattcacgccgcatccggcaagttgtattgctcaacttcgttaaatctggtgctttttcaacaacgcgcggaactgatgataagttaaccccagtaattcagccgcgcgcttctggttatatttcccttgttgcaaactgagttgcagcaactctttttcctgctgcatctgaaactcacgtaaatccagcggcagtgttggaaggctggtggtttcactaacggcgatagcgtcttcaggcggacgccgtttaaagggatcaataatgatgtcatcaagcggataatcgctggtgccgtggcgatacacactacgttccaccacgtttttcaattcacgaatatttcccggccaacgataattcagcaatgtttctctggcgcgctccgtaaaccccgggaacagaggcagcttgatttcccgacacatctggatggcaaagtattctgccatcaacattatgtcgctttcgcgctcgcgcagtggtggcagttgtacaacatcaaaagccagtcggtcgagcaggtcagcgcgaaaagtgccttcattgaccatcgccgggagatcggcattcgtcgcgcataccaaccgcacattcacctgcaatggttggctgccgccaacgcgctccagttcaccgtactcaatcacgcgcaataatttctcctgcaccatcatcggtgccgtagcgagttcatcaagaaatagcgtaccgccgtcggcacgttcaaatctccctggatgacgtttttgcgcaccggtaaacgcccccgcttcgtgaccaaacagttcggaatccagcagattttcatttaacgccgcgcagttaagggaaataaacggcccttgccaacgggaggagagataatgcaggcggctggcaatcagctctttaccggtgccgcgttcgccgatgatgagcaccggtttgtccagcggtgcgagatggctaacctgttccagcacttcgagaaagctgttcgcctcaccaagtaaattatctttgtattctgccatgatgaaattcgccacttgttagtgtaattcgctaactcatcctggcatgttgctgttgattcttcaatcagatctttataaatcaaaaagataaaaaattggcacgcaaattgtattaacagttcagcaggacaatcctgaacgcagaaatcaagaggacaacattatgggtattttttctcgctttgccgacatcgtgaatgccaacatcaacgctctgttagagaaagcggaagatccacagaaactggttcgtctgatgatccaggagatggaagatacactggttgaagtacgttctactagcgcgcgcgcgttggcagaaaagaaacagctgactcgccgtattgaacaagcgagcgcgcgtgaggttgaatggcaggaaaaagccgaactggcgctgctgaaagagagagaggatctggcacgtgcagcgttaattgaaaaacagaaactgaccgatctgattaagtccctggaacatgaagtgacgctggtggacgatacgctggcacgcatgaagaaagagattggcgagctggaaaacaaattgagcgaaacacgcgctcgccagcaggcattgatgttacgtcatcaggcggcaaacagcagccgcgatgtgcgtcgtcagctggacagtggcaaactggatgaagcaatggctcgtttcgaatctttcgaacgtcgtattgaccagatggaagcggaagcagaaagccacagcttcggtaaacaaaaaagcctggacgatcagtttgccgaactgaaagccgatgatgcaatcagcgaacaactggcacaattaaaagccaaaatgaagcaagacaatcaataataacatccaggcggcgtccgaacgcgccgccgctcatcgtctaaggagtacttatgagcgcgctatttctggctattccgttaaccatttttgtgctgtttgttttaccgatctggttatggctgcattacagcaatcgttctggtcgcagtgaattgagccaaagtgagcagcagcgattagcgcaactggctgatgaagcaaaacggatgcgcgaacgtattcaggcgctggaatctattcttgatgcagaacatccgaactggagggatcgctaatggcgggcattaatctcaataaaaaattatggcgtattccacagcagggcatggtccgcggcgtctgcgccgggattgccaactattttgatgtaccggtaaaactggtgcgtatcctggtggtgctgagcattttcttcggtctggcgctgtttaccctggttgcttacatcattttgagttttgcgcttgatccaatgccggacaacatggcctttggtgagcagctaccttccagcagcgaattgctggatgaagtcgaccgtgaactggcggcaagtgaaacgcgtttacgcgagatggaacgttatgtcacttccgatactttcacgttacgtagccgtttccgtcaactgtgaggaaagttatgaatactcgctggcaacaggccgggcaaaaggtaaagcctggtttcaaattagcaggcaagctggtacttcttaccgcactgcgctatggcccggcgggtgtggcgggctgggcgataaaaagtgttgctcgccgaccgctgaaaatgttgctggctgtggcgctggaaccgctgttaagtcgggctgctaataaactggcacagcgttataaaaggtgaggggagtttcgcaaaaattgttaaatctcaggcgtataatggatggcaattttcatccatagaaggacgcttacatgtttaaaaaaggcttacttgctctggcactggtgtttagtctgcccgttttcgccgctgaacactggatcgatgttcgtgttccagagcagtatcagcaagagcacgttcagggggccatcaatattcccctgaaggaagtgaaagagcgcattgccaccgccgttccggataaaaacgacaccgtgaaagtgtattgcaatgccggacgccagagtgggcaagcaaaagagatccttagcgagatgggatatacccacgttgagaacgccggtggcctgaaagacatcgcaatgccgaaggtcaaaggttaaaagaattcaccatgagcggcgcttatgcgccgtttttttttctgtcacaccttatttacatccccatagattatttgcgtcagctcacaaatacgctttttccctggtaaaaaatgatttcctgcgtgactaaaacccttgtgctcaattgacagtttattttctgcggagtagtctctcgtttcatgggaccgctaccacggaaaggcaacatgaaacagaaaattacggattacctggacgaaatctacggtggaacatttaccgcaactcatttacagaaacttgtaacgcgtcttgagagtgcgaaacgattaattacacagcgacgtaaaaaacactgggatgaaagtgatgtcgtgttaattacctatgccgatcaatttcacagcaatgatttaaaaccattacccacatttaatcagttttaccatcaatggctgcaaagcatttttagtcatgttcatttgttgccgttttatccatggagttctgatgatggctttagcgtaattgattatcatcaggtcgccagtgaagcgggggagtggcaggatattcagcaactcggtgaatgcagtcatttaatgtttgattttgtctgcaaccatatgagcgcaaaaagtgaatggtttaaaaactatttacaacagcatccaggttttgaagatttttttattgccgttgacccgcaaaccgatctcagcgccgtcactcgcccgcgtgcgttaccgttattaacgccattccagatgcgcgatcatagtacgcgccatttatggaccacctttagtgacgatcaaattgacctgaattaccgtagccctgaagtgttgctggcgatggtggatgttttactctgttaccttgcgaaaggtgctgagtatgtccgcctggatgccgttggctttatgtggaaagagccgggaacaagctgcatccatctggaaaaaacacatctgattatcaaactgttacggagcattattgataacgttgcgccaggtacagtgatcattaccgagaccaatgttccgcataaagacaacattgcttactttggcgcaggcgatgacgaagcacatatggtgtaccagttcagcctgccgccactggtgctgcatgcggtgcaaaaacagaacgttgaggcgctttgtgcgtgggcgcaaaacctgacactaccttccagcaacaccacctggtttaacttcctcgcctctcacgatggcatcgggctaaacccgctacggggcttgttgcctgaaagcgaaatattagagctggtcgaggcgttacagcaggaaggtgcattagtaaactggaaaaataatcccgacggtacacgcagtccgtatgaaataaatgtgacctatatggatgcgttaagccgccgtgagagtagcgatgaagaacgttgcgccaggtttatccttgcccatgcgattttgttaagtttccccggtgtgccagcgatatatattcaaagtattcttggcagccgtaatgattacgcaggtgtcgaaaaactcggatataaccgtgcgattaaccgtaaaaaatatcacagtaaagagataacccgagaactgaacgatgaagctacattaaggcatgcggtatatcatgagttgagccgtttaattacacttcgtcgcagccataacgagtttcatccggataataattttaccattgatacgattaatagttccgtaatgcgtattccaagaagtaacgctgatggtaattgtctgactggattgtttaatgtcagtaaaaatattcagcatgtaaatattactaatctgcatggtcgggatctgattagtgaagttgatatattgggtaatgaaataacgctgcgcccctggcaggttatgtggattaaataaaaaggaacatctcatgattaaaagtaaaatcgtgctgttaagtgcactggttagttgcgccctgattagtggctgtaaagaagaaaataaaacgaatgtatccatcgaatttatgcattctagcgtggagcaggagcgccaggccgttatcagtaaattgattgcccgttttgaaaaagaaaaccctggcatcaccgttaagcaagtgcccgtggaagaagatgcctataacactaaagtcattactcttagtcgtagcggtagcctgccggaagtgatcgaaaccagccatgactacgccaaagtgatggacaaagagcagcttatcgatcgcaaagcggttgccacagtcatcagcaacgttggtgaaggcgcgttttacgatggcgtactgcgtattgtgcgtaccgaagatggtagcgcatggaccggtgttcctgtcagcgcctggattggcggtatctggtatcgcaaagatgtgctggcaaaagcggggcttgaggagccgaaaaactggcaacagctgctggacgttgcacagaaactgaatgacccggcgaataaaaaatacggcattgcgctgcctacagcagaaagcgtgttgacggaacaatccttctcccagtttgcgttatccaaccaggctaacgtctttaacgccgaaggcaaaatcacccttgatacaccagagatgatgcaggcactgacctattaccgcgaccttactgccaacactatgccgggttctaacgacatcatggaagtgaaagacgcctttatgaacggcaccgcgccgatggcgatttactccacctatatccttccggctgtgattaaagaaggcgacccgaaaaacgtcggtttcgtggtgccaaccgagaaaaactctgcggtctacggcatgttgaccagcctgaccattaccgccgggcaaaagaccgaagagacggaagcagcagaaaaatttgtcacctttatggagcaggcagacaacattgccgactgggtgatgatgagcccaggtgctgcgctgccggtgaataaagcggtggtgactaccgccacctggaaagacaacgacgttattaaggcgctgggtgaactaccgaatcagctaatcggtgaactgccaaatattcaggtttttggcgcagtaggggataaaaactttacccgcatgggtgatgtgacgggttctggcgtggtgagtagtatggtgcataacgtcaccgtgggtaaagccgatctctctactacgctgcaagcgagccagaaaaaactggatgaactgatcgaacagcactaaacccaggacaggaatccgcaatgaacaggctttttagtggtcgttccgatatgccctttgcgctgctgcttctcgcgcccagcttattactgctgggcggtctggtggcgtggccgatggtgagcaatatcgaaatcagttttttacgtctgccgctcaatcccaacatcgagagtacgtttgttggggtgagcaactatgtgcgtatcctctccgatcccggcttctggcatagcctgtggatgacggtctggtataccgcgctggtggtggcgggcagcaccgtgctcgggctggcggtggcgatgtttttcaaccgcgagttccgcctgcgcaaaaccgcgcgtagcctggtgatcctctcctacgtaacgccgtccattagcctggtgttcgcctggaaatacatgttcaacaacggctacggcattgttaactacctcggcgtcgatcttctgcatctctatgagcaggcaccgctgtggttcgataatccgggcagtagctttgtgctggtggtgctgttcgccatctggcgctacttcccgtatgcctttatcagctttctggcgattttgcagaccatcgacaaaagcctgtacgaagcggcagagatggatggcgctaatgcctggcaacggtttcgtatcgtcacgctgcccgcaattatgccggtcctggcgacggtggtgacactgcgcaccatctggatgttctacatgttcgcggatgtttatttgctgacgaccaaggtcgatattctcggtgtatatctctacaaaaccgcctttgcctttaatgatttaggaaaagcggcggcgatcagcgtggtgctcttcatcattattttcgctgtcattctgctgaccaggaaacgggtgaacctcaatggcaacaaataaacgcacactcagtcgcatcggtttttactgcgggctggcgctgtttctcatcatcacgctgtttccattttttgtgatgctgatgaccagcttcaagggcgcgaaagaggcgatcagtctgcatcctacgctgctgccgcagcagtggacgctggagcattacgtcgacatttttaacccgatgattttcccgtttgtcgactacttccgtaacagtctggtggtgtctgtggttagttccgtggtggcggtattcctcggcattcttggggcttacgcgctttcccgcctgcgctttaaaggtcggatgaccatcaacgccagcttttacacggtgtatatgttctctggcattttgctggtggtgccgcttttcaaaatcatcaccgcgcttggcatttacgacactgagatggcgctgatcatcaccatggtgacgcaaactctgcccaccgccgtgtttatgctgaaaagctacttcgacaccatccccgatgagatcgaagaagcggcgatgatggatggcctcaaccgtctgcaaattatcttccgcatcaccgtgccgttggcgatgtccgggctgatatccgtgttcgtctactgctttatggtggcgtggaacgactatctgtttgcgagcattttcctctccagcgccagcaatttcaccttaccggtgggcctgaacgcgctgttcagtacgccagattacatctggggacggatgatggcggccagtctggtgaccgcattgccggtggtgattatgtatgcgcttagcgaacgttttattaagagtggtttgaccgccggtggcgtgaagggctaaagcggccagtttctttacaaggagttttaaatgaaaaagttagtagccacagcaccgcgtgttgctgcgctggttgagtatgaagatcgggcgattttagctaatgaagtgaagatccgcgtgcgtttcggcgcaccgaaacacggaacggaagtggtcgacttccgcgccgccagcccgtttattgatgaagactttaacggcgaatggcagatgttcactccgcgtccggcagatgcgccgcgcggcattgagtttggcaaattccagcttggcaacatggtggttggcgacattatcgagtgcggcagcgacgttaccgactacgcggtgggcgacagcgtatgcggctacggcccgctctccgagacggtcatcattaacgcagtgaataactacaagctgcgcaaaatgccgcaaggcagctcctggaaaaacgccgtctgctacgacccggcgcagtttgccatgagcggcgtgcgcgatgccaacgtgcgcgtaggggattttgtggtggtggtagggcttggcgcaatcggtcaaattgccatccaactggctaaacgcgctggcgcttctgtggtgattggcgtcgatcctatcgcccatcgctgtgatattgcccgtcgccacggcgcggatttctgccttaaccccatcggcactgatgtaggtaaagagatcaaaacgctgaccggcaagcagggtgccgatgtgattatcgaaaccagcggctacgccgacgcgctgcaaagcgcgctccgcggtctggcttatggcggcaccatctcctatgtcgcgtttgccaagccgtttgccgaaggttttaacctcggacgcgaagcgcatttcaataacgccaaaattgtcttctctcgcgcgtgcagcgaaccgaacccggattatccgcgctggagccgcaagcgtattgaagaaacctgttgggaactgctgatgaacggttatctcaattgcgaagatttaatcgacccggtggtgacctttgccaatagcccggaaagctatatgcagtatgtcgaccagcatccggaacagagcatcaaaatgggcgttacgttttaattcaaaggaatgaaaaaaatgaaaatcggcacacagaatcaggcgttctttccggaaaacattctggagaaatttcgttatatcaaagagatgggcttcgatggttttgagattgacggcaaactgctggttaacaacatcgaagaagtcaaagcggcgatcaaagaaaccggtttaccggtgaccaccgcctgcggtggctatgacggatggattggcgactttatcgaagagcgtcgtcttaatggcttaaagcagatcgagcgcattctcgaagcgctggcagaagtgggcggtaaaggcatcgtcgttccggctgcgtggggcatgtttaccttccgcttaccgccgatgaccagcccgcgtagcctggacggcgaccgcaaaatggtgagtgattccctgcgcgtactggaacaggtcgccgcgcgtaccggaaccgtggtgtatctcgaaccgttaaaccgctatcaggatcatatgatcaacaccctcgccgatgcccgccgttacatcgtcgaaaacgatcttaaacatgtacagattatcggcgatttctatcacatgaatatcgaagaagataacctggcgcaggcgctgcatgacaaccgcgacctgctcggtcatgtgcatattgcggataaccatcgctaccagccgggcagcggcaccctggatttccacgcgctgtttgaacagctgcgcgcggataactatcagggctatgtagtgtacgaagggcgtatccgggcggaagatcctgcccaggcgtaccgtgatagcttggcctggttgcgtacctgctaagaggtctttgtgaaaagtgcaatgacaagctctccgctgcgggtcgcgataataggcgcaggccaggtggcggataaggttcatgctagctactactgcacccgcaacgatctggaactggtggctgtctgtgacagccgcctttcccaggcgcaggcgctggcagaaaaatacgggaatgcatccgtgtgggacgatccgcaggccatgctgctggcggtgaaacctgatgtggttagcgtctgcagtcctaaccgttttcattacgaacataccctgatggcactggaagcgggctgccatgtgatgtgcgaaaaaccgcccgccatgacgccagaacaggcgcgggaaatgtgcgataccgcgcgcaaactgggcaaggtgctggcctacgactttcaccatcgttttgcgctcgatacgcaacagctgcgtgaacaggtgaccaacggcgttttgggagagatttacgttaccaccgcccgcgccctgcgtcgctgcggcgttcccggctggggtgtctttaccaataaagaactgcagggtggtggcccgctgatcgacatcggcattcatatgctggatgctgcgatgtatgtgctgggctttccggcggtgaaaagcgtgaatgcgcatagctttcaaaagatcggcacgcaaaagagctgtggtcaatttggtgagtgggatccggcaacttacagcgtcgaagatagcctgtttggcaccattgaatttcataacggcggcattctgtggctggaaacgagttttgcactcaacatccgcgaacagagcattatgaacgtcagcttttgtggtgataaagctggtgcgacgctgtttccagcacatatctacaccgataacaacggtgaattaatgacgctgatgcaacgggaaatagcagacgacaaccgccatttgcgcagcatggaagcctttatcaatcacgtacagggcaagcccgtgatgatagccgacgccgagcaggggtacatcatccagcaactggtggcggcgttgtatcaatccgcagaaacagggacgcgtgtggaattatgaccaggccagtaacgttaagtgaaccccatttcagccagcataccctgaacaagtatgcaagcctgatggcgcaggggaacggctatcttgggcttcgcgccagccatgaagaagattacacgcgccagacgcgagggatgtatctggcggggctgtatcatcgggcgggaaaaggtgaaatcaacgaactggtgaacctgcctgatgtcgtggggatggagattgccataaatggtgaggttttcagcttatcccacgaagcctggcagcgtgagcttgactttgccagtggcgaattacgccgcaatgttgtctggcgtaccagcaacggcagtggttacaccatcgccagccgtcgctttgttagcgcagaccaactgccgctcattgcgctggaaatcactattacgccactggacgccgacgcgagtgtgctgattagtacaggcattgacgccacgcaaaccaatcacggtcgccaacatctcgacgaaacccaggtgcgggtgtttggtcagcatctgatgcaggggagctacaccacccaggatggacgcagtgatgtggccatcagctgttgctgtaaggtgagcggtgatgtgcagcaatgctataccgccaaagagcgccgtttactgcaacataccagtgcgcagcttcatgcaggcgagacaatgacgttgcaaaaactggtgtggatcgactggcgggatgacaggcaagctgctttagacgagtggggcagcgcgagccttcgccagcttgaaatgtgcgcgcagcagagttacgaccaacttcttgcagcaagtacagaaaactggcgtcaatggtggcagaaacgtcgtatcacggtaaatggcggcgaagcgcacgatcagcaagcgttagattatgcgctttatcatctgcgcatcatgacgcctgcccacgacgagcgcagcagcattgcggcaaaaggcttaaccggcgaaggctacaaaggccacgttttctgggatacagaagtatttttgttaccgtttcatctgtttagcgatccgacggttgcccgaagtttactgcgttatcgctggcacaacttgccaggcgcgcaggagaaagcgcgacgcaacggctggcagggcgcgctatttccgtgggaaagcgcgcgcagcggcgaagaagagacgccggaatttgccgccattaacattcgcaccgggctgcggcaaaaagtggccagcgcgcaggcggaacatcatctggtggccgatatcgcctgggcggttattcaatactggcagaccacgggggatgaaagtttcattgcgcatgaaggcatggcgctacttctggagacggcaaagttctggattagccgcgcggtgagagttaacgatcgtctggaaattcatgatgttattgggccagacgaatataccgaacatgtcaataataatgcatacaccagctatatggcccgctacaacgttcaacaggcgctgaatattgcccgccagttcggctgtagcgacgatgcgtttatccatcgcgccgaaatgttcctcaaagagctatggatgccagaaattcagcccgacggcgttttgccgcaggatgatagctttatggctaagccggcgattaatctggcgaaatacaaagcggcggcggggaagcaaaccatactgctggattatagtcgcgcagaagtgaacgagatgcagatcctcaaacaagctgatgtggtgatgctcaattacatgctgccggagcagttcagtgcggcaagctgtcttgccaatctgcaattttatgaaccgcgcactattcacgacagcagtttaagtaaagcaatccacggcattgttgccgcacgctgtggcctgctgacccaaagttatcagttctggcgcgaggggactgaaatcgatcttggtgctgatccgcatagttgtgatgatggtatccatgctgccgcaactggcgctatctggctgggggcgattcagggttttgccggggtgagcgtgcgtgacggtgaattgcatctcaatccggcgttacctgagcagtggcaacagttgtctttccctctgttctggcagggctgcgaattacaggtcactcttgacgcgcagcgtattgcgattcgaacttctgcgcccgttagtctgcgtttgaacggtcagcttataaccgtggctgaagaatctgttttctgtttgggtgattttattttgcccttcaatgggaccgctaccaaacatcaggaggatgaatgaaactgcaaggggtaattttcgatctggatggtgtaatcaccgataccgcgcatctgcatttccaggcgtggcagcagattgccgctgaaattggcatcagcattgatgcgcagtttaacgaatccctaaaagggatcagccgcgatgagtctctgcggcgcattctgcaacacgggggcaaagagggcgactttaacagccaggagagggcgcaactggcgtatcgcaaaaatctgctctatgtccacagtctacgcgagttgacggtcaacgctgttctacccggcattcgctctttgctggcagatctccgtgcacagcagatcagcgttgggctggcttctgtctccctgaatgcgccgacgattttagcggcgctggagctgcgcgagtttttcaccttctgcgcggatgcttcccaacttaaaaacagcaaaccggacccggaaatctttctcgccgcctgtgcagggctgggcgtgccgccgcaggcatgtatcggcattgaagatgcgcaggcgggcattgacgccattaacgccagcggtatgcgcagcgtggggatcggcgcgggcttaaccggggcgcaattactgttgcctagtacggaaagtctcacctggccgcggttaagcgccttctggcaaaacgtataacaaaggaatcaacatggctcagcttagcttacaacatattcaaaaaatctacgataaccaggtgcatgtggtgaaggacttcaacctggaaattgccgataaagagttcatcgtgtttgtcggcccgagcggctgcggtaagagcaccaccctgcgcatgattgccgggcttgaggagatcagcggcggcgatctgttgatcgacggcaaacgaatgaatgacgttccagccaaagcacgcaatatagcgatggtgttccagaactacgcgttgtatccgcatatgacggtttacgacaacatggcgtttggtctgaagatgcaaaaaatcgccaaagaggtgattgatgagcgggtgaactgggcggcgcaaattctcggcctgcgtgagtacctgaaacgtaagccgggggcgctttccggcgggcaacgtcagcgagtggcgcttgggcgggcgattgtacgcgaagcgggcgtgtttttaatggatgaaccgctctctaaccttgatgccaagctgcgcgtgcaaatgcgcgcagagatcagcaagctgcatcagaaactgaacaccaccatgatctacgtgacccacgatcagaccgaagcgatgaccatggcgacgcggattgtgattatgaaagacgggattgttcagcaagtaggtgcgccgaaaaccgtttataaccaacccgcgaatatgtttgtttccggatttattggaagtccagcgatgaattttattcgcggcacgatcgatggcgataaattcgttacggaaacgcttaaattaaccattcccgaagagaaattagcggttctgaaaacacaggaaagtttgcataagcccatcgtgatgggaatacgaccggaagatattcatccggacgcgcaagaggaaaataacatttccgccaaaattagcgtggcagaattaaccggtgcggaatttatgctctacaccacggttgggggcacgagttaaacggttgggggcacgagttagtggtccgtgctggtgcgttaaatgattatcatgcaggagaaaatatcactattcattttgatatgacgaaatgtcatttctttgatgcagaaacggaaatagcaattcgctaaatacagggggaaggcattcccccaggataatacaaggaacaataatgaaaaagttattaccctgtaccgcactggtgatgtgtgcgggaatggcctgcgcacaggccgaggaaaggaacgactggcactttaatatcggcgcgatgtacgaaatagaaaacgtcgagggttatggcgaagatatggatgggctggcggagcctagtgtctattttaatgccgccaacgggccgtggagaattgctctggcctattatcaggaagggccggtagattatagcgcgggtaaacgtggaacgtggtttgatcgcccggagctggaggtgcattatcagttcctcgaaaacgatgatttcagtttcggcctgaccggcggtttccgtaattatggttatcactacgttgatgaaccgggtaaagacacggcgaatatgcagcgctggaaaatcgcgccagactgggatgtgaaactgactgacgatttacgtttcaacggttggttgagcatgtataaatttgccaacgatctgaacactaccggttacgctgatacccgtgtcgaaacggaaacaggtctgcaatataccttcaacgaaacggttgccttgcgagtgaactattatctcgagcgcggcttcaatatggacgacagtcgcaataacggtgagttttccacgcaagaaattcgcgcctatttgccgctgacgctcggcaaccacagcgtgacgccgtatacgcgcattgggctggatcgctggagtaactgggactggcaggatgatattgaacgtgaaggccatgattttaaccgtgtaggtttattttacggttatgatttccagaacggactttccgttagcctggaatacgcgtttgagtggcaggatcacgacgaaggcgacagtgataaattccattatgcaggtgtcggcgtaaattacagcttctgataatgggctaaattgccggatgcggcgcgagtactttatccgatctataaatgtaggccggataagatgcgctagcatcgcatctggcattcaggcaaggtagctggtatttatttcagcgtcatatgcgtggcaacggtaatattctgtggactcggttttccagaaattaagcggaataataactcgcagctttgttgacctaactcctgcgtcggaacatcgatgccgcccggtgcaggcgttaaaataaaactcagcgtttcattgctataacccaccaccgctaactgctgcggaatagcaatatttttctctgctgccgcacgataaatgctcattaatttcaggctgtcagtggcaaacaccgcctcaggcaacggactctggcttaataattgccgtgctgcttttaatgcagtttcatgggtataaccgccatcaacaatccattcatcacgcactgcaatattatgcgcagccaggctctgcttataaccattaacgcgatcaacgctaacatggacatcaagcggagcatgcaggcaggcaatattttgatgcccactttcaattaatgcatcggtcaacgcaatgctgtcgccaaaattatcggtatcgacagaataaacatgggcatattgaccttcaactttgccaatcaccaccaccggaatatcatatttatcgagttgggcaaaaaaactctcatccgctgggctactgagcataataatgcctttaatcattttctgcttaattttgctttcgcatttttgcagatcttctgccggattgtggctcgtttgtaatatcacgtcgaaaccttcttcttcagctttggcggtgatggcatgcaaaacttcagagaaaaacggattacccgccgtagttttggtgctacgggtagaaatcaccataatggcatcaaaaccgctagaggtcagcgcgcgggccagcttgtttggctgatactgtaattcttcaatggcccgtaacactttttcgcgcgcttccggggagatattagtttgcttattcagcacgcgacttacggtggatttacttacgcctgcaaccctggcaatatcataaatagtaggggacataggtcaggaactccgtccgaacgtgaatgctgcacatcttatggagttcgccggtcgatgacaacacgggcagttgataatcaatggcctggcccccacattcatatccttacgaatgattttttttctggtcttcagagcagcacaggacagcaatgaagcgacttaaaaatgaactcaatgcgctggtgaatcggggtgtcgacagacatctgcgcctcgctgtaaccggacttagccgcagcggcaaaacagcgtttatcaccgcgatggttaatcagttgcttaatattcacgccggagcacgtttgccgctgttaagtgcggtgcgtgaagagcgcctgctgggcgtgaaacgcattccccagcgtgactttggcattccgcgcttcacctatgacgaagggctggcgcagttatatggcgatccacccgcctggccaacgccaacgcgcggcgtcagtgaaatccgcctggcgctacgttttaaaagcaatgatagcctgctacgccactttaaggatacctccacgctgtatctggaaattgtggattatcccggcgaatggttgctcgacctgccgatgctggcgcaggactatttaagctggagccgccagatgacgggcttactcaatggtcagcgcggagaatggagcgcgaaatggcgaatgatgagcgaagggctggacccgctagcgcctgccgacgaaaaccggctggcggacattgccgccgcgtggaccgattatctccaccactgtaaagagcaggggctgcactttattcagcctgggcgctttgtcttgccgggagatatggcaggtgcgcccgcgctgcaattcttcccgtggccggatgtcgatacctggggcgagtccaaactggcgcaggccgataagcataccaatgccggaatgctgcgcgagcgctttaattattactgcgagaaggtggtgaaggggttctataagaatcattttctgcgctttgaccgccagattgtgctggtggattgcctgcaacctctcaacagtgggccacaggcatttaatgatatgcgtctggcactgacgcagctgatgcaaagttttcactacgggcagcgtaccctgttccggcgtttgtttagcccggttatcgataagctattgtttgctgccactaaagcggaccatgtgaccatcgatcagcacgctaatatggttagtttactgcaacaactgattcaggatgcctggcaaaatgcggcgttcgaagggatcagcatggactgcctggggctggcgagtgttcaggcgaccaccagcggcattattgatgttaacggtgagaaaatcccggcgctgcgtggtaatcgacttagcgatggcgcaccgctcactgtttatcctggcgaagttcccgcacgtttgcctggtcaggcgttctgggataagcaaggcttccagtttgaggcatttcgtccgcaggtgatggatgtcgacaaaccactaccgcatattcgtcttgatgctgcgctggaatttttaataggagataaattgcgatgaccgaaccgttaaaaccacgtattgatttcgacggtcctctggaggtcgatcagaatcctaaattcagggcgcagcagacctttgacgaaaatcaggcgcaaaattttgccccggccacgctcgacgaagcgcaggaagaagaggggcaagtcgaagcggtaatggacgcagcgttacgtccgaaacgcagcctgtggcgcaaaatggtgatgggagggctggctctgtttggcgcaagcgttgtcgggcagggtgtacagtggacaatgaatgcctggcaaacccaggactgggtggcgctgggtggatgtgccgctggggcattgattatcggcgctggcgtaggttctgtggtaacagagtggcggcgcttatggcgcttgcgacagcgcgcccatgaacgcgacgaagcgcgtgatttattgcatagccacggcacgggcaaaggccgcgcattttgcgaaaaactggcgcagcaggcgggtattgatcagagccatccggcgctgcaacgctggtatgccagtatccatgaaacgcaaaacgaccgtgaagtggtcagcctgtatgcgcatttggtccagccagttttagatgcccaggcgcggcgcgaaatcagccgtagcgcggcggaaagtacgttgatgattgcggtcagcccgctggcgttggtcgatatggcgtttatcgcctggcgcaatctgcgtttaattaatcgcatcgccacgctgtatggcattgaactggggtattacagccgtttgcgtctgtttaagctggtattgctgaatatcgcttttgccggagccagcgaactggtgcgcgaagtggggatggactggatgagccaagatctcgctgctcgtttgtctacccgcgcagctcaggggattggtgcaggacttctgacggcacgactcgggattaaagctatggagctttgccgcccgctgccgtggattgacgatgacaaacctcgcctcggggatttccgtcgtcagcttatcggtcaggtgaaagaaacgctgcaaaaaggcaaaacgcccagcgaaaaataatgcaatatcgggtgctgaccggatatctttacgccgaagtgcccgtttttccgtctttgtgtcaatgattgttgacagaaaccttcctgctatccaaatagtgtcatatcatcatattaattgttcttttttcaggtgaaggttcccatgcgtctggaagtcttttgtgaagaccgactcggtctgacccgcgaattactcgatctactcgtgctaagaggcattgatttacgcggtattgagattgatcccattgggcgaatctacctcaattttgctgaactggagtttgagagtttcagcagtctgatggccgaaatacgccgtattgcgggtgttaccgatgtgcgtactgtcccgtggatgccttccgaacgtgagcatctggcgttgagcgcgttactggaggcgttgcctgaacctgtgctctctgtcgatatgaaaagcaaagtggatatggcgaacccggcgagctgtcagctttttgggcaaaaattggatcgcctgcgcaaccataccgccgcacaattgattaacggctttaattttttacgttggctggaaagcgaaccgcaagatagccataacgagcatgtcgttattaatgggcagaatttcctgatggagattacgcctgtttatcttcaggatgaaaatgatcaacacgtcctgaccggtgcggtggtgatgttgcgaagtacgattcgtatgggccgccagttgcaaaatgtcgccgcccaggacgtcagcgccttcagtcaaattgtcgccgtcagcccgaaaatgaagcatgttgtcgaacaggcgcagaaactggcgatgctaagcgcgccgctgctgattacgggtgacacaggtacaggtaaagatctctttgcctacgcctgccatcaggcaagccccagagcgggcaaaccttacctggcgctgaactgtgcgtctataccggaagatgcggtcgagagtgaactgtttggtcatgctccggaagggaagaaaggattctttgagcaggcgaacggtggtagcgtgctgttggatgaaataggggaaatgagtccacggatgcaggcgaaattactgcgtttccttaatgatggcactttccgtcgggttggcgaagaccatgaggtgcatgtcgatgtgcgggtgatttgcgctacgcagaagaatctggtcgaactggtgcaaaaaggcatgttccgtgaagatctctattatcgtctgaacgtgttgacgctcaatctgccgccgctacgtgactgtccgcaggacatcatgccgttaactgagctgttcgtcgcccgctttgccgacgagcagggcgtgccgcgtccgaaactggccgctgacctgaatactgtacttacgcgttatgcgtggccgggaaatgtgcggcagttaaagaacgctatctatcgcgcactgacacaactggacggttatgagctgcgtccacaggatattttgttgccggattatgacgccgcaacggtagccgtgggcgaagatgcgatggaaggtagcctggacgaaatcaccagccgttttgaacgcagcgtattaacccagctttatcgcaattatcccagcacgcgcaaactggcaaaacgtctcggcgttagtcataccgcgattgccaataagttgcgggaatatggtctgagtcagaagaagaacgaagagtaagcgcgaatatgcctgatggtgcaacaccatcaggcatattaaattatgctttcagtacagccagagctgcttcgtaatccggctcggtggtgatttcatccaccagctggctgaaaatcacattgtcattttcgtcaataaccacaacggcacgcgctgccagacctttcagtgggccatcagcaattgccacaccgtaagcttgcagaaattcagcgttacggaaagtggagagggtgataacgttgttcagaccttctgcgccgcagaaacgagactgggcgaacggcagatcggcagagatacacagcacaacggtgttgtcgatctcagttgccagttggttaaacttacgtacacttgcggcgcaaacaccggtatcaatactcgggaaaatgttcagcactttgcgtttacccgcaaactgaccgagggtgacgtcagacagatcttttgccacgagagtaaaagtctgcgctttgctacccgcctgcgggatggaattggcgactgtaaccgggttgccctggaaatgaacggtttgactcatgattatctttcctgtttacatatagttaacgtcacacctagtttatgctaactgtcaataacacagcaaacgctattacagggtctccttacaacaactgtcaacgcagtttgtaattaaaagattaacccatatctggtgaatgaaacagtgatgaaccttctgccagatcaataaatcagaaaaatttaatgatatgacagaaggatagtgagttatgcggaaaaatcaggcaacgttacgcgtatgaccagcaagctgggccagcgcatcgttattttcgatggtgatgtatttacctttgactgccagcatgccgcttttctggaagcgacccagcagacggctgatggtttctaccgtcaggcccagatagttaccgatatcgccacgagtcatcgtcaggcggaattcacgaggggagaagccgcgttgggcaaaacgacgggacaggttgtagatgaatgcagccagacgttcctcggcatttttcttgctcaacagcaggatcatgtcctgatcgcctttgatttcaccgctcatcagacgcatcatctgctgacgcagattcggcattttaccggacaaatcgtccagcgtttcgaacgggatttcacataccatgctggtttccagcgcctgcgcgaagctcgggtgatggccgctgccgatggcgtcaaatcccaccaggtcgcctgctaaatggaaaccagtgatttgctcgtcgccttgctcagtgatggtataacttttaatcgtaccggagcggatggcataaaggcttttaagttcatcaccagccttaaacagcgtctggcctttctgaataggcttcttccgctcaatgatattatcaagctgatcaagctcatgttcgttgagtgtgaacgggatgcaaagctggctgatgctgcaatcctggcaatggatagcacaaccgccagactgaatgcgccgtataattcgcttttccgggatcataggtctgctcaagccgtaattgatatttgtcaattttaacatctttttagggagcaagtaagtctaagcaaaccttaacagcagagaattccgatattagatgtaaatatatgtctatctatttgaaaacccttaagttgttaagggtaactttacataaaagtgtgaacaagctggcacaaattgtttaatgtttacagcaaaagataaccttcatggcgcaataaccactcttttcgctgaactccgcctgcatatccggtcatggtgccgtttcggccaataacccgatggcaaggtacgacgatgctgatgggattgcttccgtttgccgcaccaacggcacgcgccgcgccaggacggcccaattgctcagccagttggccgtaatgcattacctgcccgcaggggatagtgcgtagtgttttccagacttcgcgctgaaatggcgtcccccccgtagcagtgggaagcgtatcaataatgctaagattaccggcaaaatattcacgaagcttgtcgcttaaaccgcctggattggtggcagaaatgcgctcatagccttctttgcgataatggatgtccagcagctgcaccatgcgttcgctgtactcttcccattcaaccgcccgcaggcgaaattgctcatcgcaaatcacccacagtggacccagtggcgtggcaattttttcttcaagtaatctcagcatccgttctctcttaagacaaacgtgggtaaatacccggacctatcggcagaccgacaagataccacgccagcacatcgcagccatactatgcagaaacaatgctgtcgatggctgcttttgcgtcagactgtgctttcgctgccatttccggaccgtatgcgatcccttcggcgaagacaaatttcacatcggtaatgccgataaagccgaggaacgtggacagatacggcgtcaccaggtccgttggtccatctttgtggatcccgccgcggctggtaataacgatggcttttttacccgttaccagaccttccggaccgttctcggtatagcggaaagtaacgcctgcgcgggcaaccaggtcaaaatagtttttcaactgagtcgagatgttgaagttatacatcggtgccgcaataacgataacgtcgtgggctttcagctcggcaatcaactcatcggaaagtgccagagcttcctgctgacgcggagtcagcggcgcatcgctcggacgcagagcgccaaccagttcgccatccagtaccggaatcggatttgcagccaggtcgcgaacggtgatttcatcagcggagtgcttttcgcgccattgttcaacaaaataatcggacaactgattagactgagagtaccctgccaggatgctggatttaagaactaataccttgctcatggtgtttccttatagatgtttgaatgggcgatgccccgttgcttgttgacactttattcacaatcctgccacagagatagcgcaataaatcgaagcctatgttcgaatttattgaacaacgcatagaaagccgcgatgtggtactctatatctatcatttaaaagaaaattaatcaggcagactactgcccactaacgttatgacagaacaacaaaaattgacctttacggccttgcagcagcggctggattcgctgatgctgcgtgacagactgcgtttttctcgccgtctgcacggcgtgaagaaggttaaaaatcctgatgcacaacaggccattttccaggagatggcgaaagagattgaccaggcggcagggaaagtcctgctgcgtgaagcggcacgaccggaaattacttatcctgacaatttaccggttagtcagaaaaaacaggacattctcgaagcgattcgtgatcaccaggtggtgatcgtcgccggggaaacgggttctggtaaaacgactcagttaccgaaaatctgtatggagctggggcgcgggattaaaggactgatcggccatacccagccgcgtcgtctggcggcaagaacagtggcgaaccgtattgcggaagagctgaaaacggagccgggcggttgcatcggttacaaagtgcgtttcagcgatcacgtaagtgataacacgatggtcaagctgatgaccgacggtatcctgctggcggagatccagcaagaccgcctgctgatgcagtacgacactatcattattgacgaagcgcacgaacgcagcctgaatatcgattttttgctcggctatttgaaagagttgctgccgcggcgtcctgacctaaaaatcattatcacttccgcgactatcgacccggaacgctttagccgccactttaataatgcgccgattattgaagtctccggtcggacctatccggtggaagtgcgctatcgcccgattgttgaagaagccgatgacaccgagcgcgatcagttgcaggcgatttttgacgccgtagacgaactgagtcaggaaagccatggcgacattctgatctttatgagcggcgagcgggaaatccgcgataccgccgatgcgctgaacaagctgaacttacgccataccgaaatcttgccgctttatgcgcggcttagcaacagcgaacaaaatagggtattccagagccacagcggacggcgcattgtgctggcgaccaacgtcgcggaaacgagcctgaccgtaccggggattaaatacgttatcgaccccggtacagcgcgtatcagccgctacagctatcgcaccaaagtgcagcgtttgccgattgagccgatttcccaggcgtctgccaatcagcgtaaaggccgctgtggtcgtgtgtccgaagggatctgtattcgtctctattccgaagacgatttcctcagccgcccggagtttaccgatccggagattctgcgtaccaacctggccagcgttattttgcagatgaccgcgctggggctgggcgatatcgctgcgttcccgtttgtcgaagcaccggataaacgcaatatccaggatggcgtgcgtctgctcgaagagctgggcgcgatcaccactgatgaacaggccagcgcctataaactgacgccgctcggtcgccagctcagccagttgcctgtcgacccacgtctggcgcgtatggtgctggaagcgcaaaaacatggctgcgtgcgtgaggcgatgattatcacgtccgcgctctccattcaggatccgcgcgaacgtccgatggacaaacagcaggcaagcgacgaaaaacatcgtcgcttccacgacaaagagtctgactttctcgcgtttgtgaatctgtggaattatcttggcgagcagcaaaaggcgctttcttccaacgccttccgtcgcctgtgtcgtaccgattatctcaactatctgcgcgtgcgcgaatggcaggatatctacacccagttgcgtcaggtggtgaaagaacttggcattccggttaacagcgaaccggcggagtatcgcgaaattcacattgcgttgctgaccggtttactttcccatatcggcatgaaagatgccgataaacaagaatataccggcgcacgtaacgcgcgtttctccatcttccccggttctggtttattcaaaaaaccgcctaaatgggtaatggtggcggaactggtagaaaccagccgcctgtgggggcgcattgctgcgcgtatcgacccggaatgggtggagccagttgctcagcatttgattaaacgcacctacagcgaaccgcactgggaacgggcgcagggcgcggtgatggcaacggaaaaagtcactgtttatggtttgccgattgttgccgcgcgcaaggtcaactacagccagatcgatccggcgttatgtcgtgaactctttattcgccacgcgctggtggaaggtgactggcagacgcgtcacgcattcttccgtgaaaacctgaaactacgggcggaagtagaagagctggaacacaaaagtcgtcgccgcgatattctggttgatgacgaaacgttgtttgagttctacgaccagcgcatcagccacgatgtaatctccgctcgccacttcgacagctggtggaaaaaagtcagccgcgaaacgcctgatttgctcaactttgaaaaaagcatgttgatcaaagagggcgcagaaaaaatcagcaagctggattacccgaacttctggcatcagggcaatctcaagctgcgtttgagctatcagtttgagcccggcgcggatgctgacggtgtgaccgtacatattccgctgccgttacttaaccaggttgaggaaagcgggtttgaatggcagatccccggtctgcgccgcgaactggtgattgctctgattaaaagcttgccgaaaccggtacgccgtaattttgtacccgcgccaaactatgccgaagcgtttttaggccgcgtcaaaccgctggagttaccgttgctcgacagccttgagcgcgagttacggcggatgaccggcgttaccgttgaccgcgaagactggcactgggatcaggtgcccgatcacctgaaaattaccttccgcgtggtggatgacaaaaacaagaagctaaaagaagggcgcagcctacaagatctgaaagatgcgctgaaaggcaaagtgcaggaaacgctatctgcggtggcggatgacggtatcgagcagagcggcttacatatctggagttttggtcagctgccggaaagctacgaacagaagcgtggcaactacaaagtgaaggcgtggccggcgctggtggatgagcgcgacagtgtggcgatcaaactgtttgataacccgctggagcaaaagcaggcaatgtggaacggtcttcgccgtctactgctgctgaatattccaagcccaatcaaatatttacatgaaaagttaccgaacaaagccaagctgggactgtactttaacccgtatggcaaagtgctggagctgatcgacgactgtatctcctgcggtgtggataaattgatcgacgccaatggtggcccggtctggacggaagaaggctttgctgcgctgcatgaaaaagtgcgtgccgaactgaacgacacggtggtggatattgcgaagcaggtcgagcaaatccttacggcagtgttcaatatcaacaaacgtctgaaagggcgggtggatatgaccatggcgctggggctttctgacattaaagcgcagatgggcgggttggtatatcgcggttttgtcactggtaacggcttcaaacggctgggcgacacgctgcgatatttgcaggcgattgaaaaacggctggaaaaactggcggttgatccacatcgcgaccgtgcgcagatgctgaaagtcgaaaacgtccagcaggcgtggcagcaatggatcaacaaactgccgcccgcacgtcgtgaggatgaagacgtgaaagagatccgttggatgatagaagagttgcgcgttagttacttcgctcaacaacttggtacgccttatccgattagtgataagcgtattttgcaggcgatggagcagattagcggttaaccctgctatttgcctgataaagaaaaaacccggtaagcatttagcgccgggttttttattaattctaaaacggtaagggtaaaaattcaggaattcagaaaaatacaattctctgctgcaagatgaataatgtttatctacagcatttccttaaaagatatgtcaggcttgcggagtggcggttaaggacatacgatttcctcctttcagagtgctccgcttctcactattatctcacgcagtattcttaagggaacgataaggaggaaccatgaacattaccccgtttccgacgcttagcccggcaactatagatgccataaatgttatcggacagtggctggcgcaggatgatttctccggtgaggtgccgtatcaggccgattgcgtgatccttgcaggcaatgcggttatgccgactatcgatgcggcatgtaagattgcccgcgatcagcaaattcctttactgattagtggtggtatcggtcacagcacaacttttttgtatagcgccatcgcacagcatccgcactacaacactatccgcaccactggcagagcagaagcgaccatcctggcggatatcgctcatcagttctggcacattccgcatgaaaaaatctggattgaagaccagagtacaaactgcggtgaaaacgcacgctttagcatcgcgctattgaatcaggccgtagaacgagttcatacggctatcgttgttcaggaccccaccatgcagcggcgcacgatggcgacgttccgccgtatgactggggacaatcccgatgcaccacgctggttaagttatcccggattcgttcctcagttaggaaataacgcagacagtgtaatctttattaatcagttacaaggattatggccagttgagcgttatctcagtctactcactggcgagctgccgcgtttacgcgatgatagcgatggctacggtccccgcgggcgagattttatcgttcacgttgattttccggcagaagtcatccatgcatggcaaacgctgaaacatgatgcggtgctcatcgaggcgatggaaagtcgcagcttacgttaaaaattgcccgtttgtgaaccacttgtttgcaaacgggcatgactcctgacttttatttctgccttttattccttttacacttgtttttatgaagcccttcacagaattgtcctttcacgattccgtctctctgatgattgatgttaattaacaatgtattcaccgaaaacaaacatataaatcacaggagtcgcccatgagtgtacccgttcaacatcctatgtatatcgatggacagtttgttacctggcgtggagacgcatggattgatgtggtaaaccctgctacagaggctgtcatttcccgcatacccgatggtcaggccgaggatgcccgtaaggcaatcgatgcagcagaacgtgcacaaccagaatgggaagcgttgcctgctattgaacgcgccagttggttgcgcaaaatctccgccgggatccgcgaacgcgccagtgaaatcagtgcgctgattgttgaagaagggggcaagatccagcagctggctgaagtcgaagtggcttttactgccgactatatcgattacatggcggagtgggcacggcgttacgagggcgagattattcaaagcgatcgtccaggagaaaatattcttttgtttaaacgtgcgcttggtgtgactaccggcattctgccgtggaacttcccgttcttcctcattgcccgcaaaatggctcccgctcttttgaccggtaataccatcgtcattaaacctagtgaatttacgccaaacaatgcgattgcattcgccaaaatcgtcgatgaaataggccttccgcgcggcgtgtttaaccttgtactggggcgtggtgaaaccgttgggcaagaactggcgggtaacccaaaggtcgcaatggtcagtatgacaggcagcgtctctgcaggtgagaagatcatggcgactgcggcgaaaaacatcaccaaagtgtgtctggaattggggggtaaagcaccagctatcgtaatggacgatgccgatcttgaactggcagtcaaagccatcgttgatagtcgcgtcattaatagtgggcaagtgtgtaactgtgcagaacgtgtttatgtacagaaaggcatttatgatcagttcgtcaatcggctgggtgaagcgatgcaggcggttcaatttggtaaccccgctgaacgcaacgacattgcgatggggccgttgattaacgccgcggcgctggaaagggtcgagcaaaaagtggcgcgcgcagtagaagaaggggcgagagtggcgttcggtggcaaagcggtagaggggaaaggatattattatccgccgacattgctgctggatgttcgccaggaaatgagcattatgcatgaggaaacctttggcccggtgctgccagttgtcgcatttgacacgctggaagatgctatcagtatggctaatgacagtgattacggcctgaccagtagtatctatacccaaaatctgaacgtcgcgatgaaagccattaaagggctgaagtttggtgaaacttacatcaaccgtgaaaacttcgaagctatgcaaggcttccacgccggatggcgtaaatccggtattggcggcgcagatggtaaacatggcttgcatgaatatctgcagacccaggtggtttatttacagtcttaatgagtgaaagaggcggaggttttttcctccgcctgtgcgcgtcagagtttagcgaatttttcgagggtgcgaataagctgtgtgacgaagccatattcgttatcgtaccaggcgaccgttttcaccagttgtaaatcgcccacggcggtaatttccgtttgcgtggcatcaaacaccgaaccgaaatggctgccaatgatatcggaagagactatttcttcatcggtataaccaaatgactcgttattggtggttgcttgtttaagtgcgttattcacctcttcggcagtcacttttttccgagaatcgataccagttcagtgaccgaacctgttttcaccggcacgcgttgcgcatgacctttcagtttgccgctcagttccgggatcaccagaccaatggcttttgccgcccccgtagtgtggggaatgatattttctgccgctgcgcgtgaagcacgtaaatctttaccacgcgggccatccaccagtgactgggtgccagtataggcatgaatggtcgtcatcgtgccgacttctatcccgaaactgtcatgcaaggctttggccatcggcgcaagacagttagtggtgcatgacgccacggaaacaatggtgtcgttgccatccagagtgtcgtcattgacgttataaacgatagttttcatttcaccggcaggggcggaaatcaacaccttcttcgcaccagcatcaagatgcgcctgcgatttctcggcggaggtataaaagccagtacattcgacaatgatttctgcacctttcgctttccacggaatatttttagcctctttttcggcgtaaaccgcgatacttttcccatcaacgataagtgaatcttccgtaaaatcaacgctccaggggaatggtccgtagtttgaatcatgtttcagcaggtaggcgagaatttatggggaagtgagatcattaatagcgacaacgtctatgttgcttttgacttcaagtaatcgacccaacaccagtcgaccgatacgaccaaaaccgttaataccaactttactcatggttttctcctgtcaggaacgttcggatgaaaattgatcctttccaagcttagaccaggatggcgggatgggcaatctccattctcacagtgaaacgtaacgtactgaaaacgggtgaacaatatttaatgaaattttgagaaaagcccgttatgttaacggaaaattatgttaaagcaggaaatgttatggaaaataaatatagtaggttacaaatcagcattcactggctggtctttttactggttatcgcagcgtattgcgcaatggagtttcgtggtttcttcccacgtagcgatcggccactcatcaacatgattcatgtttcctgtggcatcagtattctcgtgctgatggtcgttcgtcttttgttaaggctgaaatacccaaccccgccgattatacctaagccaaaaccgatgatgacgggactggcgcatttgggacatttggtgatttatctcctgtttattgcgctgccagtgattggtttggtgatgatgtataaccggggcaacccgtggtttgcgtttggtttgacgatgccttacgctagtgaggccaatttcgaacgggtagatagcttaaagagctggcatgaaacgctggcgaatctgggatattttgtcatcgggttgcacgctgcggctgcactggcacaccactatttctggaaggacaacacacttctacgcatgatgccgcgtaaacgttcctgaaggatatttaaagaaaacgcctgtactaaaaccgacccgtggtacaggcgaagaatacgggtctacatcggaagcgcctattatatttatttgtatgataaataaaaccataatccttgcccatacgtccatctggcttatttttaatcaattcacccgatctttgatctcatcaacggtatcaaaataaaccagcgtataacgttcaaatcgaacataagattcgataaaccatggaggttatatgaaaaaactggcacttattttgtttatgggaacgcttgtttccttttatgccgatgccgggcgcaaaccctgttctggtagcaaaggggggatcagtcactgtacggcaggcggcaaatttgtctgtaatgatggttctattagtgcaagcaaaaaaacatgcactaactgaagtgtaaaaggggtgccatgagaaaatgaatctgctagtcaaatgcgcggggaaaatccccgcgcttgcccttacctggacgtgcaggccatgagcgcagcaacctccttatcaccgtcccggaaccgcagttcgtagagcgtttgtcgggtcaggagtgtgaatgtcagaatcgtaatgcagataatgagcagacacaccaccagagggttgtgcttcatagcctttctccttgccggatggcgggtaagaggctaagatctgaattgctaggttcattcgttggcctcggttgatagaaatatcggtcggggccttcgtctttctgattcccggttagcctgaaaacagaaagtctcaggcacccgcaggcatcctatgaggtttccttagggacgaaaataatcacttcacgaaattgcgtgctgttttccagaatttttcgtcattcgggttagccagtttagccattcgttactctcttcattccaatagcattaattttctatgcaataattgttgtaaaaatgtgacgcaaagaggtttttggtcataagtaattaccgtcaagtgccgatgactttctatcaggagtaaacctggacgagagacaacggtaatgaatacaactcccagtcagcgattaggttttttgcatcacatcaggttggttccgttatttgcctgcattctaggcggtatcttagttctattcgcattaagtagtgccctggctggctatttcctctggcaggccgatcgcgatcagcgtgatgttactgcggagattgagattcggaccgggttagcgaacagtagtgattttttgcgtagtgcccggatcaatatgattcaggccggggctgcgagtcgtattgcggaaatggaagcaatgaagcgaaatattgcgcaagccgaaagcgagattaaacagagccagcaaggttatcgtgcttatcagaatcgaccggtgaaaacacctgctgatgaagccctcgacactgaattaaatcaacgctttcaggcttatatcacgggtatgcaacctatgttgaaatatgccaaaaatggcatgtttgaagcgattatcaatcatgaaagtgagcagatccgaccgctggataatgcttataccgatattttgaacaaagccgttaagatacgtagcaccagagccaaccaactggcggaactggcccatcagcgcacccgcctgggtgggatgttcatgattggcgcgtttgtgcttgccctggtcatgacgctgataacatttatggtgctacgtcggatcgtcattcgtccactgcaacatgccgcacaacggattgaaaaaatcgccagtggcgatctgacgatgaatgatgaaccggcgggtcgtaatgaaatcggtcgcttaagtcgtcatttacagcaaatgcagcatagtctggggatgacagtagggactgttcgacagggcgcggaagagatttatcgtggcaccagcgaaattagtgctggcaatgcggacctgagttctcgcaccgaagaacaagcggcggctatcgaacaaactgccgccagcatggagcaactcactgcgacggtgaaacagaatgcggataacgcgcatcatgccagcaaactggcgcaagaggcttctattaaagccagcgatggcgggcagacggtttccggtgtagtaaaaacgatgggcgctatctccacgagtagcaagaaaatttctgagatcaccgccgtcatcaacagtattgctttccagacgaatattctggcactgaatgctgccgttgaagccgcgcgagcgggtgagcaagggcgtggatttgccgttgtcgccagcgaagtacggacactcgcaagtcgcagcgctcaggcggcgaaagagattgaaggcttgatcagtgaaagtgtcaggttaattgacctggggagcgatgaggtggcaacggccgggaaaaccatgagcactattgttgatgccgtcgcgagtgtcacacatatcatgcaggaaatcgccgccgccagcgatgaacaaagtagaggcataacgcaggttagccaggcgatttctgaaatggataaggtgacgcaacagaatgcttctctggtagaagaggccagtgcggcggcggtgtcccttgaagaacaggcggcacgattaactgaggcggtggatgtattccgtctgcacaaacattctgtgagcgcagaacctcgcggagcgggtgaaccagttagtttcgctacggtgtgaaaatgttcaaggagggatcgacagatcccttcacctttcagaacggcatactttttcgaatagcgttaatcatcaactggcaaccagaagagaacgtcgcatctacgcgggtcagtattccaatcggttcgcctgcaccatgtcccggaacaggcagggccaccagcgtggcatgacgcaggtcgtcttttacagcgccagaagggacaaaccacacgtaatcgtattcaaccgtaagttgacgagataggctagcagacagcgtttcgatacaaccgctaggaattttacagccctggctctgcactaatgcatcactatgctggcgtggcgcagtgccttctggacttacaacgaccggccattccagcacccggcttagcgttacgttctcctgaagtagcgggtgattagggcggacaaccagcttcaagctttcaagaaacagcagttcgtaattaagcccggtcatcagttcaggatcactcatccgaccaatgccgatatcgatttccccggtttttaaacccgccagaatcatagggttactcattgtcgcaacttgcaaggtcgtctctttttgttgctgatgaaactgacctataacgctaggtaatatccccagtgccgcagtaggtagtgcaccaaccctgacgacatcattattaagaccttctttacgatgaaggctccgtccggcagtgttgatggcgtcaagaactctgactgcatgcgttaaaaattgttcgccgggtaaggtaagttgcgccccctgacgaccacgctcaaacaagcgagcgccagtcagctgctccagttcattcaatgtcttagagagcgcaggttgactcaaattaagggtttcagccgcgcgccccaaagttccttgttgtgcgacagctacgaatgtatgaaggtggcgcaaacggatgcgctgactaaacagactatttttttccataagcgatgttaaaaacgaagcggtgtcgctgacaagtgaagttgtttgattatgataacttgattgcaaaatattattaacaattaaagcaattatgttacagcaaaatggataatattgatgttttcgcggcgagatcacagtttgtaaattcttcccgcaagagtgaatgcggttacctacactccagattactgaccactggaggcagacactatggcgaacagcatcacggcggatgagattcgggaacagtttagccaggcaatgagtgccatgtaccagcaagaagttccgcaatatggcacgctgctggaactggtagctgatgtgaatctggctgtgctggaaaacaatcctcaactgcacgaaaaaatggtaaatgcagacgagctggcgcgactgaatgttgaacgtcatggggcgattcgcgttgggactgcacaagagcttgctactcttcggcggatgtttgccattatggggatgtacccggtgagctattacgatctcagccaggcaggggtgccggtacatagcacagcatttcggcccattgatgatgcttctctggcgcgtaatcccttccgcgtttttacctccttactccgccttgagcttatcgagaacgaaattttgcgccagaaagcggcggagattctgcgtcagcgcgatatcttcaccccacgttgtcgacaactgttagaggaatatgagcagcagggcggctttaacgaaacacaggcacaggagtttgtgcaggaagccctggaaacgtttcgctggcaccagagtgcaacggtagatgaagaaacctatcgcgcattgcacaacgaacatcggttgattgctgatgtggtctgttttcctggatgccatatcaaccacctgacgccacgtacgctggatattgaccgggtgcagagcatgatgcctgaatgcggaattgaacccaaaattctcatcgaggggccgccgcgccgcgaggtaccgattttactacgccagaccagctttaaagcactggaagagacggtgttgtttgcggggcagaaacagggcacgcataccgcgcgctttggtgaaattgagcagcgtggcgtggcattaacgccgaaagggcgacaactgtatgatgatcttctgcgtaacgctggaaccgggcaggataatctcactcaccaaatgcatttacaggaaaccttccgcacttttcctgacagtgagtttttaatgcgtcagcaagggttggcatggttccggtaccgtctgacgcctagcggtgaggcgcatcgtcaggcgattcatcctggagacgatccacagcccttaattgaacgtggttgggtagtggcgcaacccatcacctatgaagatttcttgcccgttagcgcggcggggatcttccagagtaatctgggtaatgaaacgcagacacgcagtcacggtaatgccagtcgcgaagcatttgagcaggcgttgggttgtccggttttggatgagttccagctttaccaggaagcggaagaacgcagtaaacgtcgctgtggtttgctttaaaatctgaccatccgcctttgcaaaaatttgcctgattttacaaacgaatcaggctcatcccatcgacataaaaaaaatgccgatttatgcatattctctcagttcaacaattggattattaataaatattgtctagagtgagcggtcataaataagcactttcttgccgctgaaaacgaccagcgcgggaccattcacaacaccagaaggactcactttcaggtatggatcgtagacgatttattaaaggttcaatggctatggccgccgtgtgcggtaccagcggcattgcttctcttttttctcaggcggcattcgcggcagattctgatattgccgacgggcaaacccagcgttttgacttctccattctacagagtatggcgcacgacttagcgcaaacagcgtggcgtggtgcgcctcgtccgttacctgacacgctggcgacaatgacgccgcaggcttataacagtattcaatacgacgccgaaaaaagcctctggcataacgttgagaaccgtcaactggacgctcagttcttccatatgggaatgggattccgtcgccgcgttcgtatgttttctgtagatccagcaacacatctggcgcgtgaaattcactttcgcccggagttgttcaaatacaacgatgcaggtgttgatacaaaacaattagaagggcaaagcgatctcggctttgccggttttcgcgtgtttaaagcccccgaactggcgcgccgtgatgtagtaagttttctcggcgcgagttatttccgcgccgttgatgatacatatcaatacggtttgagcgcccgcggcctggcgatcgacacttacaccgacagtaaagaagagttccccgactttaccgccttctggtttgatacggtaaaaccgggggcaactacctttaccgtttatgcgttgctcgatagcgccagcattactggtgcctataagttcactatccattgtgagaaaagtcaggtgattatggatgtggaaaatcacctgtatgcgcgcaaagacattaaacagctgggcattgcgccgatgaccagtatgttcagctgcggtactaatgaacgtcggatgtgcgatacaattcatccgcaaattcatgactctgatcgtctgtccatgtggcggggcaacggcgagtggatttgccgtccgctgaataatccgcaaaaattgcagttcaatgcttacaccgacaacaacccgaaagggtttggtttattgcaactggatcgtgacttctcccattatcaggacattatgggctggtataacaaacgcccaagtctgtgggtggaaccgcgtaacaagtggggtaagggcaccatcggcctgatggaaatcccaacaacgggcgaaacgctggataacattgtctgcttctggcagccagaaaaagctgtaaaagcaggtgatgagtttgcattccagtatcgtctgtactggagtgcgcaaccgcctgttcattgcccattagcgcgcgttatggcgacgcgtaccggcatgggcggtttcagcgaaggttgggcgccaggtgaacactatcccgaaaaatgggcgcgtcgttttgccgtcgatttcgttggtggtgatctgaaagctgccgcgccaaaaggcattgagccggtgattacgctttccagtggggaagcgaagcaaatcgaaattctctatattgaacccatcgatggttatcgtattcagtttgactggtatccgactagcgactccactgatccggtcgatatgcggatgtatctacgttgtcagggggacgctatcagtgaaacatggctgtatcagtatttcccgccagcgccggataaacgtcagtatgttgacgaccgcgtgatgagttaatcgttttttcttcggcaccttcttcgggaggtgccgtctggttaaacacgatcccgctcgcatttttccctaagttaaatgagtaatctgatggtgtgtatttcagatacaccttgtcagccactaacagggagtgcgtatgtttccagaataccgagatttaatatcccgtctgaaaaacgaaaatcctcgctttatgtccttgttcgataaacacaataaacttgatcatgaaattgccagaaaggaaggttccgacggtcgagggtacaatgcggaagtggtccgcatgaaaaaacaaaagctacagttaaaagatgagatgctcaaaatcctgcagcaggagagcgtcaaagaggtgtaaactttcctaagccgccagccaggcggcttttttaacaactgcatggattgactggagataagatgactgaaacgataaaagtaagcgaaagtcttgaattacatgctgttgcagaaaatcacgtcaaacctctttatcagttaatctgtaaaaataaaacctggttacagcagagcctaaactggccgcagtttgttcaaagtgaagaggacacgcgaaaaacggtgcagggtaatgtgatgttgcatcaacgcggctatgccaaaatgttcatgattttcaaagaagatgaacttatcggcgttatcagctttaatcgtattgaaccactgaataaaaccgctgaaatgggctactggctggacgaatctcatcaggggcaggggatcatttctcaggcgctgcaggcattgattcatcattacgcccagtctggtgaacttagacgcttcgtgatcaaatgtcgggtggacaatccgcaaagcaaccaggtcgctttgcgcaatggttttatccttgaaggttgcctgaaacaggctgagttcctgaatgatgcctatgatgatgtgaacttatacgcgcgtattatcgatagtcaataatcacaataaccctgccagcggcgttcgcgtaatgcgctcctcgccgttaatgacttttggaccacggacatgaaccgtgtcgccatcaaaggcttcaacgacggcgtggtcggttaactccacatggttttcaattatcaccgcacctgtaatacggctctcaccttgtatgacaacgtgctcgtcgagcagaatcggtccgccacgtaccacggcatttccgccaaccaagacatgatgttttaacacacaattaccttccacaatggcatattccgccacctggctactgtaatgaatcgtcggaatggcatcttcttctatgccagctttcacctgcgcgtgaccgtagactttagcgcaatcgcatagccagacattgttctcttcattaccttcaatactggcaaaatcaaaaacttcggcgcgatgttcaataaaagcataccggacgacggcatcgccataaatttgtgcctggtggacaatacggctggcgctaacccttgcgcgatcataaatttggagcaggagttgatggtcgggcgttaagccttgtgcggcgacgatcatagaatgttgatcaattaaggcgtgaccaaatattctacattgcccgtaaactaaactgtcatgaatggtgacgctgtcacttatatatgcaccctggctgatttcactattatcgatccagacgttatccgttgcgtaaacctctccccacagcacgctggtgccggtgatacgcgtattaccggaaatcaccgctccgccgaacgcaatagcattctggtcgtaaatccagcaatttccttcttgtgctaacaccgtttcgcgatcgatccagccgccagcggttcctgctatcacatcgttaaaatcgctaatggcgataatctgccgtaataacacattttttttagtgccatcttcctgataactaaaggctcgctgttcttcacttagacgatatttgcgcatagcgttttcccacaggtgacttactataaccgtagcaaattctgcggctctggctatgctcgagaaaattccataaaatgcatttcaaatatactttataaattaaacaaaatgagtaagaagatgcagagcgataaagtgctcaatttgccggcaggctactttggtattgtgttggggacgatagggatgggatttgcctggcgctatgccagccaggtttggcaggtcagccactggttaggggatgggctggtgattctggcgatgatcatctggggattattgactagcgcatttattgcccgactcatacgctttccgcatagcgtgctggcggaagttcgccatccagtgctgagcagttttgtgagtttgtttccggcaacgacgatgctggtggcgattggttttgttccgtggtttcgcccactggcggtgtgcctgttcagttttggtgtcgtggttcagttggcttatgccgcctggcaaactgcgggattatggcgcggatctcaccctgaagaagctaccacgcctggactgtatctgccgacagttgccaacaactttatcagcgcaatggcctgtggtgcgttgggctacaccgacgccggtctggtgtttttaggcgcaggcgttttcagttggctaagccttgaaccggtgatcttgcagcgtctgcgcagtagcggagaattacccacggcactgcggacaagtctcggcattcagctcgctcctgcgctggtggcttgtagtgcctggctgagcgtcaacggcggcgagggtgacacgctggcgaaaatgcttttcggttatggactgctgcaactgctgtttatgctacgtctgatgccatggtatctctcccagccatttaatgctagtttctggagtttcagcttcggcgtatctgcactggcaaccaccggtttgcatctggggagtggcagcgataatggatttttccatacgctggcggtgccgctgtttatctttaccaattttattattgcaatactgctcatccgtacttttgcgcttctgatgcagggaaaattgttagtcagaaccgagcgcgccgttttaatgaaagcagaggacaaagaatgatcattcgtgacgaaaactattttactgataaatatgaattaacccgcacacactctgaagtactggaagcggtgaaagtggttaaaccgggtaaaacgctggatctgggctgtggcaatggtcgtaacagtctttacctggcagccaatggttatgatgttgacgcatgggataaaaatgccatgagtatcgccaacgtcgagcgcattaaatccattgaaaatctggataatttacacacccgagtcgttgatctgaataacctcacatttgatagacagtacgattttattcttagcactgtggtgctgatgttccttgaggctaaaaccatccccgggttgattgccaatatgcaacgttgcactaaacctggtggttacaacctgattgtggcggcgatggataccgctgattatccatgtaccgtcggcttcccgtttgccttcaaagagggagaattacgtcgatattacgaaggctgggagagggtgaaatacaatgaagacgtcggcgagctgcaccgcaccgacgccaacggtaatcgtattaaactgcgtttcgccacgatgctggcacgtaaaaaatgacccggtaagcacaaaacgcgtgaaaattccccacgctgagatgatttactgttcttcttttcggtaagcatattttttatcgaagggatgtgaaattaatcacagtagtcgaagtttttagcagcttaacttactgaaatttaagtactgatgattgacttagcccctttttcggcattgactatgtcgtctgaaaaggggctgaaaaatttattttcaccaacactttttttgccacaacacgaagcggcgctttttgctataacttagaaagtaatataatcatctcaggaaactattcatgcgtaccacaagttttgcgaaagttgcagctttatgcggcttattggctctgtctggttgtgcatctaaaatcacccagccagataaatattctggttttttaaacaattactctgatttaaaagaaacaaccagcgctacaggtaaacctgttttacgttgggtagacccgagttttgatcaaagcaaatatgacagcatcgtctggaacccaatcacttattatccggtaccgaaaccgagcacccaggtagggcagaaagttctggataaaattttgaactataccaacaccgaaatgaaagaagcgatagcgcagcgtaaaccactggttaccaccgctgggccgcgtagtctgattttccgtggggccattaccggtgtagataccagcaaagaagggctgcaattctatgaagtggttcctgttgcattagtggttgcggggacgcaaatggctacaggccaccgtaccatggatactcgcctctattttgaaggtgagctgattgatgcagcgactaataaaccggttatcaaagtcgttcgtcagggcgaaggtaaagacctgaataacgaaagtacgccaatggctttcgaaaatattaaacaagttattgatgacatggcgaccgatgccaccatgtttgacgttaacaaaaagtaattccagacgcgccatcgttagatggcgctttttatccggtgcgccgtaaaaccccatccttcagggcggggatataaggcgcggttttccacctgaccaggtgtttgctgttgttcaatgtattggcggatgacggatattggcgcacctccgcagctactggcaaaatagccaggactccacaaaacgcctttgtagtaatacctgaatgcaatatctggtcgatctcgtcgcagtcacctacccgatacgcctttgaggctgtttaccagactggatatcgccagtttgggaggatagttaattaacaaatggacgtgatctggttcgccatccatttcaaccagttcagcttcaaaatcagcacatacatttgaaaagtaagtgcgtagtttttctgtcgcgtcatggtcaaaaatctggcgtcggtatctggtgacaaagagcaggtgaacatgcatcaggaaaacacaatgccttccacgccggatatcggtttcttttttcacagaccaaagtatcatttgacctgtgaaacgattacaggcatttaaattccagttaagacccggtggtcaacaggagtgtgaaatgaggcgcttcgcaggcgcatgtcgtttcgttttcaatcgtgctctggcacgtcagaatgagaatcatgaggccggtaataaatacatcccttacgggaaaatggcttcctggctggttgagtggaaaaatgccactgaaacgcaatggcttaaagattctcccagtcagccattgcaacagagtctgaaagaccttgagcgggcttacaaaaacttcttccggaagcgggctgcttttccccgattcaaaaagcggggacagaatgatgcattccgctacccgcagggcgttaagctcgatcaggaaaacagccgtatttttctgccgaaactgggctggatgcgctaccggaacagccgtcaggtcacgggtgttgtgaaaaatgtcactgtcagccagtcctgcggtaagtggtacatcagtattcagacagaaagtgaagtaagtactccggttcaccctagtgcaagtatggtcgggctggatgctggcgtggctaaactcgccacgctgagtgatggcacagtctttgagcctgtaaacagttttcagaaaaaccagaagaagctggcgagacttcagcgacagttaagccgcaaggtcaaattcagcaacaactggcaaaagcagaaacgcaaaatacagcgactgcattcctgtatcgcaaatatccgcagggactaccttcacaaagtcacaacggccgtcagcaaaaaccacgcaatgatagtcattgaggatttgaaggtcagcaacatgagtaagagtgcagcgggtacggtcagccagccggggcgcaatgtccgggcaaaaagtggtttaaaccgtagcatactggatcagggctggtatgaaatgcgccgccagcttgcgtataagcagctctggcgtggcggtcaggtgcttgctgttccgccagcgtatacaagccagcgttgcgcgtactgtggtcatacagcgaaagagaaccgcctgagtcaaagtaaattcagatgccaggtatgtggatatacagcgaacgccgatgtaaatggcgctcgcaacattttagcggcggggcacgccgttcttgcctgtggagagatggtgcagagtggccgcccgttgaagcaggaacccaccgaaatgattcaggcgacagcctgaacgtagcagggatccacgtccttcagggcgtggaggatgtcaatatcggtttctgtcagcgattaaattcaacaccacgtaacaaacgcctccggcaattaatccccaaaacgcagaaccaatcccgaccagcgtcaatccacttgccgttaccagaaatgccaccaccgccgcgtctcgctcacgctcattatgcagcgcctgatacaaactgccgccgatggtacttaacagcgccagacctgccagcatctggatccaacttacgggcagggcagccatcatcccggtaatggcactaccaaacagacctgcgagcaaatagaaaatgcctgcaacggcagcggccagccaacgttgatctttatccggatgcgcttccgggctttggcaaatagccgcggtgattgccgcaataccgacggaataaacgccgaaaggggaaaaaaccagtgccagcaatccagtaaatacaattaatgggctaacaggagcgctatatccagctgctttcattgctgcgatacccggtgcgttttggcttgccatcgtcaccagaaaaagggggagtgcaacgctcaggctgtgagcaaagctaaaatcaggggtaatataagtggggagaacgggtttaaagacaacatcagttgtgacaacgtcaccttgcgcgatgacgatcacgatcccaataatcatcgcggcaattaccgcatagcgcggcgcaacggccttggttgccagccataccagcaacatacttccacacaacgtaaattgaccgtccagactggcaaacgcctgtaaaccaaagcgtaataaaatcccggcaagcattgccgccgcaaggctgtgcggaataatgcgcatcagacgagcaaagagtcccgttatgccgcagaggactattagcgcgttggtgacaataaaaacgccgatggcttcgttaagtgttagtccctgcaatccggtgaccaacaaagccgcgccaggcgtactccatgcggtgagaacaggtacgcgataccataatgtcagagtcagcgtactgacgcccattgccagccccagcgccgtcatccagccagagatttgtgcagtggtggctccggcgacaatcgctgcttgccagattattgccgcactactggcgtagccaattaataccgccagaaaccccgccagtagcgtgggtggaggaatagaaaacagacgcatagtcacctcgtgcgttatagcgtacaggcaccgtagcatttgtccgttataacgcacaagtgataaacttccgttttgccggaggagtcgcatggaaaatctcgctcgctttttatccaccacacttaaacaactacgccagcagcgcggctggagtcttagccgactggcagaagcgacgggcgtttctaaagcaatgttagggcagattgagcgtaatgagtccagtccgacggtcgcgacattatggaaaattgccaccgggttgaacgtaccatttagtacatttatttctccgccgcagtccgctacgcctagtgtttatgatccacaacagtaggcgatggtgatcactagcctgtttccttatgatccacaactctgctttgaacacttcagcattcagatggcatctggtgcaataagcgaaagcacgccccatgagaagggggtaatcgaacatgtcgtcgtcattgatggacaacttgatctgtgcgttgatggggaatggcagacccttaattgtggggaaggcgttcgatttgctgcagacgtcacgcatatctatcgtaatggtggggagcaaaccgtacattttcattccctcatccattacccgcgcagttaagcgggaaaactatttcgcaacgtcgcgcttgtggctaaaatagccgccatttttcagctactggataagaatgtgaccgtatcttctcatcgacttgaactgttaagcccggcacgcgatgccgccattgcccgcgaagctattttgcacggtgccgatgctgtttatatcggcggccctggttttggtgcccgtcataatgccagtaatagcttgaaagatattgccgagctggtgccgtttgcccatcgttatggtgcaaaaattttcgtcacgcttaacaccattttgcatgatgatgagctggaacccgcgcaacggctgattactgacctctaccagaccggtgtcgatgcgctgattgttcaggatatggggattctggaacttgatattccgccgattgaactgcacgccagtacgcagtgcgacattcgtacagttgaaaaagcgaagttcctctctgatgttggcttcacgcagattgtgctggcgcgagagctgaatcttgatcagatccgcgcgattcaccaggctacggacgcgaccattgaattctttattcatggggcactgtgcgtggcctatagcggtcagtgctacatttctcatgcgcaaacagggcgtagcgccaaccgtggcgattgcagccaggcgtgccgtttgccatacacattgaaagacgatcaggggcgggtggtttcctatgaaaaacatctgctgagcatgaaagataacgatcagactgccaacctcggcgcgctgattgatgctggtgtacgctccttcaagattgaagggcgttacaaagatatgagctacgtgaagaatatcaccgcccattatcgccagatgcttgatgccattattgaagaacgtggcgatctggcgcgcgctagtagtggtcgtactgaacatttctttgttccaagcacggaaaagactttccaccgtggtagcacagattattttgtgaatgcccgtaaaggcgatattggcgcgttcgatagcccgaaatttatcggcctgccggtaggcgaagtagtgaaagtggcgaaagatcatctcgatgttgccgttaccgagccactggcaaatggcgatggcctgaacgtgttgattaaacgtgaagtcgtcggttttcgtgccaatacggtcgagaaaaccggagaaaatcagtaccgcgtctggcccaatgaaatgccagcagatttgcacaaaattcgtccacatcacccactaaaccgtaatcttgatcataactggcagcaggcactgacaaaaacctccagcgaacgtcgggtggcggtagacattgaactgggcggctggcaggaacaactgattctgaccctcaccagtgaagagggtgtcagcatcacgcatacgctggacgggcagttcgacgaagccaataacgccgaaaaagcaatgaacaatctgaaggatggtctggcaaaactggggcaaaccctctattacgcccgcgatgtgcaaattaatttgccgggggcgctgtttgtaccaaacagtctgttaaaccagttccgccgtgaagctgctgacatgctggatgctgcgcgtcttgccagttaccagcgcggcagccgtaaaccggttgctgatcctgcgccggtttatccgcaaacgcatctgagtttcctcgcgaacgtatacaaccagaaagcgcgtgaattttatcatcgctatggtgtgcagctgattgacgcggcgtatgaagcacatgaagagaagggcgaagtcccggtgatgatcaccaagcattgtctgcgctttgcctttaatctgtgcccgaaacaggcgaaaggcaatatcaaaagctggaaggcgacgccaatgcaactggttaacggcgatgaagtattaacgctaaagtttgattgccgcccatgcgagatgcacgtcattggcaaaatcaaaaatcacatactgaaaatgccgttaccgggaagcgtagtggcatccgtaagtccggatgagctgctgaaaacattgccgaagcgaaaagggtaaaacgccagttttctggttactcacaacttattgaatctgcatgatattgcctgccgggtaaggcgttacgccgcatccggcatcaaatgactcaacgttgtcccgcttctggtttgcggcttttttgccagtaaaaatgctcgcgcaaaccttccgcgctctcttccgccacagcacgcaattcatcgctgtccgcttcatgacgcagctgatgatccacattctttacccacacaaattcatgtcctttgtgccctgccatgagttgtccactaaacagagcacacgttaataagacaacgcttaacgccttcgtaaacatcctgccacctttttcttaccttttgccgctatgatgccgatcgtttcttgaggttattattcagttttgcaaattagcgcaaagaaattctggaatcttccttcctgattttgcattgcattctgccgttgcggcgatttagtgctattttcgagcaaattacacacggaggtaaacactaatgtttactttgttgatatactcagcggcagggaggcgatgtgaaacaaagcgagttcagacgttggctcgaatctcagggcgtcgatgtagcgaatggcagcaaccatttgaaactcaggtttcatgggaggcgcagtgtcatgccgcgtcacccctgcgatgagattaaagaaccattgcgtaaagcaatcctgaaacaactcggtttgagttaatcgccaattaaaaaggttaatgacatgcgagagacagtcgaaattatgcgttatcccgtcactcttacacccgcgccggaaggcggttatatggtttcttttgtggatatccctgaagcgttgacccagggcgaaactgtcgctgaagcgatggaagcggcaaaagatgctttactgaccgcatttgatttttattttgaagataacgagcttatccctttacctagcccattaaatagtcacgatcactttattgaagtacctttgagcgtcgcctctaaggtattgctgttaaatgcttttttacagagtgaaatcactcagcaagagttagccaggcgaattggcaaacctaaacaggagattactcgcctatttaacttgcatcatgcgacaaaaatcgacgccgtccagctcgcggcaaaggcgcttggcaaagagttaagcctggtgatggtttaattacagttaacgaaaagttgtcatttttaacaactgatatagactgccgaatcatctgcacataattacgattcgataatgaaaaaataccagcagcttgcagaacaattacgcgagcagattgcgagcggtatctggcaacccggcgatcgtttgcctagcttgcgtgaccaggtggcgcttagtggcatgagctttatgactgtcagccatgcctatcagttgctcgaaagtcagggatatattatcgcacgaccgcagagcggttattacgttgcgccacaggcaataaaaatgccgaaagcgccagtcattccagtcactcgagatgaagcagtcgatatcaacacttatatttttgatatgttgcaggccagtcgcgatccgagcgtcgttccgtttgccagcgcctttcccgacccgcgacttttccccctccaacaactaaaccgcagcctggcgcaggtaagcaaaaccgccacagcgatgagcgtgattgaaaacttaccgccaggaaacgcagaactgcgtcaggctattgctcgtcgctatgccttacagggcatcaccatttctcctgatgaaattgtcattactgccggggcgttagaggcattaaacctcagtttgcaagcggtaactgaaccgggcgattgggtgatagtagagaatccttgtttctacggtgcgttgcaggcgctggagcggctacggctgaaggcgttaagcgtggcgacggatgttaaagaagggatagatcttcaggcgctggaactggcgttgcaggagtatccggtgaaagcgtgctggctgatgactaatagccagaatccactcggatttaccttaacgccgcaaaaaaaagcacaactggtggcgttgctcaatcagtacaacgtaacgctgattgaagatgacgtttacagcgaactttattttggacgggaaaaaccgctgcctgcgaaagcgtgggatcgccacgatggcgttttgcattgctctagctttagcaaatgtctggtgcctggttttcgtattggttgggtcgccgccggaaaacatgcacgtaaaattcaacgcttgcagttgatgagtacgctttccaccagcagtccgatgcaacttgcgctggtggattacctttccacgcgccgatacgacgcccatcttcgtcgcctgcgtcgccagcttgcggaacgtaaacaacgtgcctggcaggcactgctgcgttatctgcctgcggaagtgaaaattcatcataatgacagtggttactttctctggttggagctccccgagccgttagatgccggcgaattaagcctggcggcactgacgcatcatatcagtattgcgccgggtaaaatgttttctaccggtgaaaactggagtcgttttttccgttttaataccgcgtggcagtggggagagcgtgaagaacaggcggtaaaacaattaggcaaacttattcaagaacggctgtaatagcgtttaatttaattcctcttagattgggtaatatgaatttcgaatagcagtcatatttcctaactccttgactatactccagaagataaccttacagacggcataatgcgcggtagctcacaacctgaataaattttctcaggggcgaaggtgtgcctgcaagccgccgtctatggttaaacaaggagatatttttacggcacggcggctgaacaattaattacgacaggagtaagaccttatgagcaagacatttgcccgcagcagcctgtgtgcgctcagcatgacaataatgaccgctcacgccgccgaaccgcctaccaatttagataaaccggaagggcgactggatattatcgcctggccgggatacatcgaacgcggacaaactgataaacaatacgactgggtaacgcagttcgaaaaagagacaggctgcgcggtgaatgtgaaaaccgccgcgacttccgatgaaatggtcagtctgatgaccaaagggggttacgatctggttacggcatccggcgatgccagcctgcgtttgattatgggtaaacgcgtgcagccgattaataccgcattgattcccaactggaaaacgctcgatccgcgcgtggttaaaggcgactggtttaatgttggcggcaaagtttacggcacaccttaccaatgggggccgaacctgctgatgtacaacactaaaaccttcccgacgccgccggatagctggcaagtggtttttgttgagcaaaatctgccggacggcaagagcaataaaggccgcgttcaggcttatgatggccctatctatattgcggacgctgcgttgttcgttaaagccactcagccgcagttgggcatcagcgatccgtatcaactcaccgaagaacagtaccaggcggtgctgaaagtgctgcgcgctcaacacagtttgatccatcgctactggcatgacactaccgtgcaaatgagcgatttcaaaaacgagggtgtggttgcttccagtgcctggccctatcaggccaacgccctgaaagccgaaggccagcctgttgctaccgttttcccgaaggagggtgttaccggttgggctgataccaccatgctgcatagcgaagcgaaacatccggtttgcgcctacaaatggatgaactggagtttaacgccaaaagtgcagggcgatgtggcggcctggtttggcagcttaccggtagtgccggaagggtgtaaagccagtccgttattaggcgaaaaaggttgtgaaaccaacggttttaactatttcgacaaaatcgccttctggaaaacgcctatagcagaagggggcaagtttgttccctacagtcgctggacgcaggattacattgccattatgggcggtcgctaacttcgctggggtgctttatgacgtacgcagtggagtttgacaacgtcagccggttgtacggtgacgtgcgcgcagtagatggcgtcagtattgcgataaaagatggtgagttcttctctatgctggggccgtccggctccggcaaaaccacctgcctgcgcctgattgctggcttcgaacagctttccggcggggctatctctatctttggtaaacccgccagcaatctgccaccgtgggagcgggacgtgaatactgtctttcaggactacgcgctatttccgcatatgagcattcttgacaatgtcgcctatgggctgatggtcaaaggcgtgaataaaaagcagcggcacgcaatggcgcaagaggcgctggagaaagtggcgttggggtttgtacatcaacgtaaaccgagtcaactttctggtggtcagcgccagcgggttgctatcgccagagcattggtgaatgaaccgcgcgtattgctgttggatgaaccgctcggcgcactggatctcaaattgcgtgagcagatgcagctggaactgaaaaaactgcaacagtctctcggtatcacttttatcttcgttacccacgatcagggcgaagcgttaagcatgtccgatcgtgtggcggttttcaataatggacgcattgagcaggtcgattccccgcgcgatctctatatgcgcccgcgcacgccgtttgttgccgggttcgttggtacaagcaatgtttttgatggactgatggcagagaaactttgtggcatgacgggaagcttcgccctgcgaccggaacatatccgcctcaacacccctggtgaactgcaggccaatggcacgatccaggcggtgcaatatcagggcgcggcaactcgttttgaactgaaattgaacggcggtgaaaaactgcttgtgagtcaggccaatatgacaggcgaagaactgcctgccacgctcacgcccggacaacaggtgatggtttcctggagccgtgatgtgatggtgccgctggttgaggagaggtgaatggcgatgaatgtattgcaaagtcctagtcgtccaggtctgggtaaggtgtccggtttcttctggcataatccggggctggggctgtttttactgctgcttggcccgctaatgtggtttggcattgtctatttcggcagcctgctgacactgttatggcagggattttatacttttgacgatttcaccatgagcgtaacgccggaactgacgctggcgaatatccgtgcgctgtttaatccggcgaattacgacatcattctccgcacgctgactatggctgtggcagtcactatcgccagcgccattctggcttttccaatggcgtggtatatggcgcgctataccagcgggaaaatgaaagcgtttttttatattgcggtaatgttgccgatgtgggcgagctacattgttaaagcctatgcctggacgttattgctggcaaaagatggcgtggctcagtggtttttacaacatcttgggctggaaccactgctgactgcgttccttacattacctgcggtgggcggaaatacgctgagtacttccgggctggggcgctttctggtgtttctctatatctggttgccgttcatgatcctgcccgttcaggcggcgcttgagcgtttgccgccgagtttgttgcaggcgagcgctgatctcggcgcacgtccacgacaaacctttcgctatgtggtgctgccgctggcaatcccgggtattgccgctggctctatctttaccttcagtctcacactgggcgattttatcgtcccgcagctggttggtcctccaggatattttatcggcaatatggtttattcccagcagggggcgattggcaatatgccgatggcggcggcattcaccctggtgccgattattctcatcgcactgtacctggcgttcgtgaaacgtctgggagcgttcgatgcactctgaacgcgcaccgtttttcctcaaactggcggcctggggcggcgttgttttcctacattttcccatcctgataatcgccgcctatgcgtttaacactgaagatgcggcgtttagttttccaccgcagggcctgacgctgcgctggtttagcgtggcagcacagcgtagtgatattcttgatgccgtgacactgagtcttaaagtggcggcgctggcgacattaattgcgctggtgttagggacgctggcagctgccgcgctgtggcgacgagactttttcggcaaaaacgccattagcctgttactgctgctgcccattgcgctgccgggcattgtcactggtctggcgttattaaccgcctttaaaaccatcaatctggagccgggatttttcaccatcgtggtcggtcatgcgactttttgtgtagttgtggtgtttaacaatgtcatcgcccgttttcgccgcacctcctggagtctggttgaggcgagtatggatcttggggccaatggctggcaaaccttccgctacgtagtgttgccgaatctcagtagcgcgttactggcaggaggaatgctggcgtttgccttgagcttcgatgaaatcatcgttacgacctttacggcaggtcatgaacgaacgttaccgttgtggttgctcaatcagcttgggcgaccgcgtgatgtaccggtaactaacgtggtggcactgctggttatgttggtaacaaccttgccgatcctgggggcctggtggctaacccgcgaaggcgacaatggtcaataaccactgatacaggaatatgctatgcaacataagttactgattaacggagaactggttagcggcgaaggggaaaaacagcctgtctataatccggcaacgggggacgttttactggaaattgccgaggcatccgcagagcaggtcgatgctgctgtgcgcgcggcagatgcagcatttgccgaatgggggcaaaccacgccgaaagtgcgtgcggaatgtctgctgaaactggctgatgttatcgaagaaaatggtcaggtttttgccgaactggagtcccgtaattgtggcaaaccgctgcatagtgcgttcaatgatgaaatcccggcgattgtcgatgtttttcgctttttcgcgggtgcggcgcgctgtctgaatggtctggcggcaggtgaatatcttgaaggtcatactagcatgatccgtcgcgatccgttgggggtcgtggcttctatcgcaccgtggaattatccgctgatgatggccgcgtggaaacttgctccggcgctggcggcagggaactgcgtagtgcttaaaccaagtgaaattaccccgctgaccgcgttgaagttggcagagctggcgaaagatatcttcccggcaggcgtgattaacatactgtttggcagaggcaaaacggtgggtgatccgctgaccggtcatcccaaagtgcggatggtgagcctgacgggctctatcgccaccggcgagcacatcatcagccataccgcgagctccattaagcgtactcatatggaacttggtggcaaagcgccagtgattgtttttgatgatgcggatattgaagcagtggtcgaaggtgtacgtacatttggctattacaatgctggacaggattgtactgcggcttgtcggatctacgcgcaaaaaggcatttacgatacgctggtggaaaaactgggtgctgcggtggcaacgttaaaatctggtgcgccagatgacgagtctacggagcttggacctttaagcagcctggcgcatctcgaacgcgtcggcaaggcagtagaagaggcgaaagcgacagggcacatcaaagtgatcactggcggtgaaaagcgcaagggtaatggctattactatgcgccgacgctgctggctggcgcattacaggacgatgccatcgtgcaaaaagaggtatttggtccagtagtgagtgttacgcccttcgacaacgaagaacaggtggtgaactgggcgaatgacagccagtacggacttgcatctagcgtatggacgaaagatgtgggcagggcgcatcgcgtcagcgcacggctgcaatatggttgtacctgggtcaatacccatttcatgctggtaagtgaaatgccgcacggtgggcagaaactttctggttacggcaaggatatgagtctttatgggctggaggattacaccgtcgtccgccacgtcatggttaaacattaaggataatattgcagatcgtaagagtatgagatgatcttgcgtactgtcagagcactgatttctctgacagtacgtgctgcgtgcaaaatcactacatcaaataaaccagccaaatctcatagagataagagtaaacaaaccaacagcagcaaagaaatttatcagtactacagttctactggaaacattcatttttgccaccttttatcattgcccctatgtgtatagtacgggttaagaaaatccgcaataatactcattctgaagatggataagggcaagttgctgtttgatgattttttctcaaactggtgaaaaaacttgatgcacgtcaaaaaatgacgcatatttgcgcgcgttttattcatctggctggacgcccgtacatgtctctctatcaacacatgcttgttttttatgcggttatggcagcaatcgcatttcttatcacctggtttctttctcacgataagaaacgcatccgtttcttaagcgcctttctggtgggggcaacatggccgatgagtttcccggtggcgctgttgtttagtctgttttaaatcttactcactggcttgacggcaccacgcagacttatatcatttggatgaatcgataaatttcacaagtggctaaggagaaagtatgagccatctggatgaagtcatcgcgcgcgtggatgccgcgattgaagagagcgtcattgcccatatgaacgaattattaatcgccctgagcgatgacgcggagttaagtcgggaagatcgctacacccagcagcaacgtctgcgcacagcgatcgcccatcacggtcgcaagcataaagaagatatggaagcgcgccacgaacagttaaccaaaggcggcaccatcctctgattaaaaactgcgtctggctaccaaccaggcgccaaccacaagtaaaattgcgccacaaattgggccgaacaacgcccgtagtggtacgccatgactgcggaagatatccagcatcagaccgccaatcagctgactggcgaccagtacagcaatagttgtcgccgctcccacattctgatatccgctgatactggcgaagacaaaaaagcttcccagcaagccaggtataagtgtccaccagcgcacgctggacaccagttcgccaaaccccgccatgccttgtttaaaccataaaatagaaacaaagagcacaatccccaccagactgttcagcaacatggcgatgagaatggtagaggaggtctgggtgatgcgcaccatcagcgtgttctggacaaccagaccaattccggcggcaatcaaaaaagcaagggtgaggctctgattcatccaatcgcgtccggttcagtgcgctcgtcgagttgcaactgcataaatgtcagatccagccaacgaccaaatttagtgcctacctgcggcatttgcgcggtgacgacaaatcccaggctctggtggagatgcaggctggcctgattttggctttcgatcccggcgaccatgacatgcttcccgcaatcccgcgcttcatcaatcaatcggcttaacaatttacgccccagacctttgccctgatgatcgggatggacataaacgctatgttccacggtatggcgaaaaccatcgaaactacgccagtcgccaaagctggcatatcccgtcactacgccgttttcctcgctcaccagcactggataacctgctaaagtccgcgcttcaaaccaggcaatgcggttatcagcatccaccgtttggtcattccagatagccgccgtatacaacacggcgtggttataaatttccgcaatggcagcacagtcggctttgcgggcaaaacggatggacatgtctggcctcaataaaataatgatgatgatgttatcaatactatcgaaaacagcccgaagcaacggattcctcgatgaaattattgcgtgttgcagaggggatgtgacggctgcaaacaaaaccaatcccgtgagcctgctactattgatggattcatgccaaaagcacaggagagcattatggggcaacaaaagcagcgtaatcgacgttgggttctggccagccgtccacatggcgcacctgttccggagaatttccgtcttgaagaagatgatgtcgccacaccgggtgaaggacaggtgttactgcgcacagtttatttgtccctggacccgtatatgcgtggacgtatgagcgatgagccatcttatagtccgcctgttgatattggcggcgtgatggtcggcggtacggtgagccgtgtcgtggagagcaatcatcctgattatcagtctggcgactgggtgctgggctacagtggatggcaagactatgacatatccagtggtgatgatctggtgaaacttggcgatcatccgcaaaatccaagctggagcctgggtgtgctagggatgccaggctttaccgcttatatgggcctactggatatcggtcagcctaaagagggcgaaacgttggtggtagctgcggcgacaggaccagtgggggcgacggtggggcaaatcggcaaacttaaaggttgcagagtggtgggggtagccggtggcgcggaaaaatgccgccatgctaccgaggtgttaggcttcgatgtttgtcttgatcaccacgcggatgattttgccgaacaactggcgaaagcgtgcccaaaaggtattgatatctattatgaaaacgtgggcggtaaggtattcgatgcggtgctaccgttacttaatacatctgcgcgcattcccgtctgcggattagtgagcagctataacgctacagagctaccacccggtccggatcgtttacctctgttgatggctacagtgctgaaaaaacgtattcgcttgcaaggttttattatcgctcaggattatggtcaccgcatccatgagtttcagagggagatggggcaatgggtgaaagaggataaaatccactaccgcgaagaaattactgacggtttagagaatgcgccacagacgtttatcggcctgctgaagggtaaaaacttcggcaaagtggtgatccgcgtggcgggtgatgattaaagtttcaacggcggcgtaagccgccataaaaatccaggcaaaaagcttattttcagctttaattaactaaccacatcattgttctgctgctaataacaacaaaggtgagtggtttatgattattcactttaatacaccaggtgaattccttctgccatgcaggcagggttggacagaaaacacgcgaaggaattaaaatgcctggaacgggaaaaatgaaacatgtcagtttgactctgcaggttgagaacgacctgaaacatcagcttagtattggcgcattaaaacctggcgcacgcctgattactaaaaatctggcggagcaattaggtatgagtattacacctgtgcgtgaagcattattacgtctggttagcgtgaatgcgctttctgtcgcacctgcacaagcatttacagttccggaagtggggaaacgtcaattagacgaaatcaatcggatccgctacgaactggaattaatggcagttgctctggctgttgaaaacctcaccccgcaagaccttgcggaactccaggaattgctcgagaaattacagcaggcgcaagaaaagggcgacatggaacaaatcattaatgtaaacaggctatttcgcttagcgatttatcatcgcagtaatatgcccatcctgtgtgagatgattgagcaactgtgggtcaggatggggcctggtttacattatctctatgaagcgattaatccagcggaattacgggagcatatagaaaactatcatctgttactcgctgcgttaaaagcaaaagacaaagagggatgcagacattgtcttgctgaaattatgcaacaaaatattgctattttataccagcaatacaatcgttaaagtaaatgcccggcaaataccgggcatcaaggtaattactcaaatctccacgcaatattcatgccgacaccataatttcgtccggggctaggttcgtaatatcgcccgttactctcattgacaatgacagaaccaacgtattctttatcgaataaattatcgacacgaccaaataaatccacagttaaattgtggtaattgtatttatacccggtgaataagccgacgagagtataagacggcgcttttgccgtattttcatcatctgccataatatcgcccatataacgcgcttccgtgcctgcataccaaccatcttccggtacataacctatgctcgcaaagcccatattacgggcgatccctggcatccgattaccgttacaatcctgttcattgcaaacattgctgcgataggtcgcatcaagccaggtccaggacgcgtttacgcgaaaatctcctgcgaaacgttgatcccatgccagttcagcgccttgacgacgggtctttccggcatttttgtaagtcgtacgcccaccgctactgctatcgacaacaatttcatcatcagtgtcggtctgaaacaatgcgagactaagcagcccatcaccaatacgcgttttactgccgatctcaattgtatcgttggtggatggttttaaacctaagttcataccgctttgcccatcagcacgataagacagctcattaatcgtcggcgtttcaaaacctcgcccggctgccagatagatattccaggcatcggtcattgcatattttaagctaccggcaggtagccatttatgataactggcatcaccgctgtcatcgccgttacccggagtaacgtaatggtcgttggaatcaaaccacacggagctgtagcgcacgccagcatccaggctcagtttttcgctcagctgccactgcgtctgtaaatagggatcgatgttccacatcagattgcgttcgtcgcgacgcaactcacctttttgcccgtactccggcatgccgctattcaggcggaagttattgtagcccttgcggttttcactcatgttttcgtagttcaggccggtagtgaacgtgaccggaacgcccagttcaccacggtgtgtccagcggctgtctattccctggtaatggcgttgcagggtaatcacgccgcccgcatgactcgggttaagttgtggtgccatgggtatactctggtactgggtcgtttctcgctctccggcatacatcatcacactcatatcatcccggctactcaggctacgctcatagcgcaacccagcctgagtttgcttgatggtttttcgcgtgtcgtactgttctgcacgaggcgcttgttgtggattagccttccattctgctttggttagcccacctgggtcatctgctttgatatccacactattgaaaatcagacttaatttgctggcttcatcaatgcgtacgcccagtttggcattggctaaatttttctgtgcgccactatggtcacgatagccgtgggtcgtaaaacgcgtggtactgacggtgtaatcgacatcgccaggctgtgtgccgtctcccgttgcgcccgttgctttcagcccatagcgccagctgccaaaactgccgtagtaactactggcttcaatggttggtggctgttgtccggtctgggtggtgacattcattaccccaccagacgcgttgccatacagggcagagaaggggccacgcagcacttccacattttgcacactgcttaaatcgatgttggatgtttgcccttgcccgtcgggcatggtggcgggaataccgtccacatacaggcgaataccgcgaataccgtaagtggagcgggagccaaatccgcgaatgctcagctgtaaatcttgcgcatagttctgccggttttgtacctgcaaaccaggcacgccggtcagactttcggacaagttaatgcgcggtgttgccaggcgcatctcctcgccatccaccacgcttactgctgctggggtatccagttcactaaccacctgcggtgcggcactgacaatcatagtctgttcatcagcggcaaaaacaacgggggaaaggacaagcagtgcgggcaaaacggtctgtcggacggaaaaaatcttcatgaaaaaagccaggttaagaatgggaaaacgccgtcatggtaatgaaattgtaaatttatggaaaatgaaacggcacaatacgttaagtaattgagaaaattgtagtcgtaacggcaagaaatgctccacatttgagaaaataatgattaccattcccatttataacaagagcgtaacgatgattacgcttagcgaagcattgtgaagcagcaaaaatatcggttcatcaaagggagtcgtcatgcatttacgtcatctgtttagtagccgcctgcgtggtagtttactgttaggtagtttgcttgttgttagtagtttcagtacgcaggccgcagaagaaatgctgcgtaaagcggtaggtaaaggtgcctacgaaatggcttatagccagcaagaaaacgcgctgtggctcgccactagccaaagccgcaaactggataaaggtggcgtggtttatcgtcttgatccggtcactctggaagtgacgcaggcgatccataacgatctcaagccgtttggtgccaccatcaataacacgactcagacgttgtggtttggtaacaccgtaaacagcgcggtcacggcgatagatgccaaaacgggcgaagtgaaaggccgtctggtgctggatgatcgtaagcgcacggaagaggtgcgcccgctgcaaccgcgtgagctggtagctgacgatgccacgaacaccgtttacatcagtggtattggtaaagagagcgtgatttgggtcgttgatggcgggaatatcaaactgaaaaccgccatccagaacaccggtaaaatgagtaccggtctggcgctggatagcgaaggcaaacgtctttacaccactaacgctgacggcgaattgattaccatcgacaccgccgacaataaaatcctcagccgtaaaaagctgctggatgacggcaaagagcacttctttatcaacattagccttgataccgccaggcagcgtgcatttatcaccgattctaaagccgcagaagtgttagtggtcgatacccgtaatggcaatattctggcgaaggttgcggcaccggaaagtctggctgtgctgtttaaccccgcgcgtaatgaagcctacgtaacgcatcgtcaggcaggtaaagtcagtgtgattgacgcgaaaagctataaagtggtgaaaacgttcgatacgccgactcatccaaacagcctggcgctgtctgccgatggcaaaacgctgtatgtcagtgtgaaacaaaaatccactaaacagcaggaagctacccagccagacgatgtgattcgtattgcgctgtaatagatatggcgagggtgaaaacggtgagacttgcctgccttttatcacggcgtatccggcactttcgtcagtaatctgaatttgcccggcacgtagccgggcaattttgcaattaactcgccgtttcaggcttaaacacaatttcctgtttttcttcatcttcctcgacgactggcgcagtgctgtgaatttcagcaacgcgtttgcgcacaccaaaccagcctataaccagcaaaataccgataatcggcagcgccgcgatagtataagtcccgttcgggtaatcgaacgccatcagcacaaggacactcagtaaaaacagtaatgtcagccaggaagtgaagggcgcgccaggcagtttaaaactgacatccgctgctttgccttctttaatcgctttacgcaggcgcatctggcacacgatgataaacgcccaactagcgatgattcccaggctcgcgaagttcaacacaatctcaaatacgcggctcggcaccagatagttgaggaatacgccgacgacatacacaactagtgtcgccagaatcccggcatacggcacatgctgacgactcattttcgccataaaactcggtgcggaaccgcccatcgccatactgcgcagaatacgtccggtgcagtacagaccactattcaggctggagagggcagcggtcagcaccacaatgttcataatgctgccgatatatggcacacccagtttagagaaaaacgtcacgaacggactttgccccgcctgatacgcgctccacggcaataacataaccagcaacaccacggagccgacgtaaaacaggccaatacgccaaatcacactgttaatggctttaggcaccatggtctgcggatctttacattctccggcagctgtacccaccatttcaatggaggcaaaagcaaacactacgccctgaatcaacaccagcgcaggcagcaaaccgtgggggaagaagccgccattatcggtgattaaatgaaagccagtggtgttgccatccagcggctgaccactaccgaggaacactgtacccacgaccaaaaaggtcacaatggcgagcactttaataagcgcaaaccagaactccatctccgcaaaccatttcacaccgatcatattcatggtgccaacgatggtaagtgcagcgagcgcaaagacccactgcggcacgccgccaaacgcaccccagtaatgcatatacagagcgacggcggtaatatcaacaatccccgtcatcgcccagttgatgaagtacatccagccagcaacataagcggctttctcacccaaaaactcacgggcataagaaacaaaactgccactggaagggcggtgtagcaccagctcacccaatgcacgcagaataaaaaagctaaacaagccacaaattaaataaaccagtgccagtgcgggccccgccatttgcagtcgggctcctgcacctaaaaacaagccggtgccaatcgcgccgccaatggcgatcatctgcacctggcgattgcccatcgctttgtgatacccctcttcgtgggcattaagccagcggcgtttcgcggcgtgttgatcactagtgtcggtgtcgtgtttactcattgctctccctgattgctttaatgaaaaagtcatataagttgccatgaacaatgtttattcatcctggcgatgatagttatcaccattattctttatgggtataaaactatcggcgcagcatcctacccgttatcgataaacgatgcaaaacatccccttacaatcctgaaggggattaatacaactgacgaaaaaatgacaaatccttttgctggttaacctgtgtactgtcctacacttaatctttaaaagattgtgaggggcatatgattaaggtgtatggcgtacccggatggggctctacaatcagtgagctgatgctaacactggctgatattccttatcagttcgttgatgtcagtggttttgaccacgagggagctagtcgcgagttattgaaaaccctgaacccgttgtgtcaggttccgacactggcattggaaaatgacgagattatgacggagacagcggcgattgcattgatggttctcgatcgtcgcccggaccttgcgccaccggttgggcgcgccgaacgtcagctgtttcaacggctattggtctggctggttgctaatgtctatccaacattcactttcgccgattaccctgagcgttgggctcctgacgcacctgaacagttaaagaagaatgttattgaatatcgaaaaagcctttatatctggttgaatagccagctcactgctgaaccttatgcgtttggtgagcaactaacgctggtggactgttatctttgcactatgcgcacatgggggcctgggcatgaatggtttcaggataatgccacgaatatcagtgcgattgctgatgctgtatgtcagttaccgaaattacaagaagtattaaaaaggaatgaaattatttgagtgggataccagaagattatgttatttattattcagtaactttatccacaatgatgggcgtaattaattaaattcatggtatgttttttaatttatatcactctccttttcattcagcgtgtctatttcatttcctctgaaaagaaactaactattcacatcgtgcagatgtttcagttgttaagtcaggcattctataatctcaaaatgtttttaatgatggatatgctcggagttggagatgcaattaatattaatacaaataaaaatatccggcaggtatgctaaaaggataaatggcgttctctgtatttattcgcaattatctgtaggacaaatatggagagcttgatgagtcagagctaaaacagcaattgattaataaacatgttgatttattcaagaaaatggatgtattttaaatgttgattcttaatataacctaatcaatagattatcaagtgagagctacacattattggaggggcaggggaaaacaccattttgggaacaatgcatcaggtactcttaccactgaagcaagatcatccggcaccaggtggtggtgcagtgctttggaaatggtcccctcgggggagttgtcattattttctatgctatttgcttattatattcatcaggtgaatttaataaattcctaatttgaaatatccactattaagctagtgtttaacgacgttaagatggcaatgtgcagatcatgttatcagggtggggcggtagcgtatattccttatacaaaccatcattcatttcaatgattgttattgaattatttattgttgtgaataaaaagacattatgaatattggtttgactttgcatatcaggttttttattactcgctgtaatgtacgagcctgtcgtgaataacgtcgagaacccatccgttgcgtttgtgattattttgttgactaaacagacacccgtttctctgaagtaaaatcccagactaaatcatcacataaccatgacatttttctgatattccccggtaacgccagataacgatgccaaatttaccgttatgttcaatcaactccctggtccatgtcgatttatctaccacaatcgccacgcgtggaggttcaaactccaccggcattgaccaggctgcagccataatgttacgccgctgggattgctcatcgaaactggtgatcaagaccgttgggccatgatttaacagacggctggcatggtgtaattctatggggatgaatcggctcatggtatcgcctcgcgaagaaggtttttttaagcgtagtccgtaacgcaataagtaacgaaattaacgggattggcgatttgcgaacgtgatgcatgtccgcgatcgcacaaaatagccggtgcggcgtctattccaggttataagttgagaaaaccactaagggaaacgcctgatgacgcccattctgaatcactattttgcccgtattaactggagcggagctgctgcggtcaatattgatacgcttcgtgcattgcacctgaaacacaattgcaccattccgtttgaaaacctcgacgttttgctgccgagggaaatacagcttgataatcaaagcccggaagagaaactggtgatagcccgtcgtggcggttactgttttgagcagaatggcgtgtttgagcgggtgttacgcgagctggggtttaacgttcgcagcttgttagggcgcgtagtgttaagtaatccgccagcattaccgccgcgcacccatcgtttgctgttggtggaactggaagaggaaaaatggattgctgatgtcggtttcggtgggcagacgctaaccgcgccgattcgtttagtttccgatctcgtgcagaccacgccacacggagagtatcggttgttgcaggagggtgatgattgggtgttgcagtttaatcatcatcagcattggcagagcatgtaccgttttgatctctgcgagcagcaacaaagcgattatgtgatgggcaatttctggagcgcgcactggccgcagagccattttcgccatcatttgctgatgtgccgccatttgccggacggcggcaagctgacactgaccaattttcattttacccattatgaaaatgggcacgcggtggagcagcgaaatctaccggatgtggcgagtttatatgctgtgatgcaagaacagtttggtctgggcgtggatgatgcgaaacatggctttaccgtggatgagttagcgctggtgatggcggcgtttgatacgcacccggaggcgggaaaataatttatgtcaggttgccggatgcggcgtaaacgccttatccggcatacattagcccggttgtagacctgacaggcgaagcgcatcagacaacggtttcagagttcaattgcccattcggcatgaaacaaaatcaccgctgtgccactaatggtgactttttccggttggttatcacgaattgtcaccgtcacttcaatcataccgtcacgccccaatgcgcgcccctgatggcctttaacacgcaacacgttgccatcgtggggcaatacgttgtgatgtaccaaccatgcacccatcgggccattggcattgccagtcaccggatcttccacaataccaatcgcagggctgaacatgcgaccatcggtttcgtttttgcctgggcggatctggaacgggaagaaaccattgcagccaatctttttgctgatagcggtcagcgcattaaggtcagggctaagggcgtcgatatccacttccggtttcagtgggatcatcactttactgtgtcctgttgttgccacctgaattggcaagcctggcagaatatcgtcctcagtgagatgaagcgcgttgataatcgccgcacgtgtttcaccttccagcggtggctcaaagcccggcgtaccttgttccaggctaatacgataatcatcgttgtgcttttcgatagtcacgcgatgttttcctgccaggcttgtttgccagatcgtgcaatttcctaaacctaacaccttcgcacgtacatagtgcgcagctactgtcgcgtgaccgcaaatcggcacttcaaccgttggcgtaaagtagcggatgcgcacatcgctgtcgtcgctgtgcagcagaaaagcagtttcgctatggcctaactcgcgggcgataagctgcatttgcgcttcgctaagattatcggcggggaaaacaacaccggcagaattgccgcgaaacggttgactggtaaaagcatcgacgtggtacacctgcggtttcattaacgttctcctgtgactggagaactatcatagcctgcaagtggccggagagcgaagggctatccggccagggtgaaattatcgccggctacgcacaatttgatatcgacgagtaaagtactcaaacggcgcgctccacacatgcaccagtcgggtgaacgggaagagcaggaagatggtcattcccaacaccagatgcaggcggaagacgaacgctacgccgttgagcatctcactgcttccaccacggaaagtgacaatgctttgcgcccaacccaccagcttcatcatttcgctaccatcaggatactgtgcactaaacggtatggtacttagccccaacagacactggatcagcaaaatgctcatgatgatgatatccggcgtagtggaagtggcacgcacgcgctgatttgtcagcctgcgccacagcagtcctgcgccgccaatcaacgtcaacacaccgcaaataccgccgagcaccatcgccatgagttgtttcgctgccactggcaaaaaccacgcgtacatccagtgcggcgttaacatgccgaacaagtgcccgaagaaaatccccaaaatgccgatatggaacagattgctccatatcaccatcccgcgtttatcgagcatttgactactggaggcgcgccaggtgtactgcccgtagtcgtagcgcagccagctgccgaggaaaaacaccgtcgcacaaatgtacgggtagatatcgtaaaaaaagacgttcagatactgaatcatttcccacctcccgcactgatgtcgacatattgcggcgcgacatcctggctaaagcgtcgctgatattgattaagcgggctgctgtcacacgccgtggcgttatcttcaataaacttcacctgttcctcttcccacactgcatcaagcgcctggcgggtgtcatcgcgctcttcgctgtttacttgttttgtgacactgtcactactaagggagcttcccgccagttgcagcagagcatcaaacaacgcgtaccacggtgcctcgcgttgttttaagcgaccgccaagcagggcgaggatcggcgcaacattgagcaatccttctttcgcctgatcgtcaggcagtacgcttaaatactccagatacagcggtagataatcgggcagttcccgacaatccagctgcaggccgaccttttcatactccgccagcaggtccaccattgcctggccgcgatcgcgggactcggcatgaacatgttcgaacagcagcaggctcgtggtgcgcccgcggtcaaacacttcgcaccattcggcctgtttatccagcagcggcgcgttaagcaggttgtgggtgaaatccgtaagcatcggcgcgtcgcggcggatcaacgccagcgcgtcctccttgcattcccacaacagctcgtccggatactccatcaacaggccgatcactttgaggatctgcattattcgccctccgctttgtcgcgcacttcggtgatgttgatggcatcgatacggctactgttgaacaggttgaatttactgtcgctaccgtggcaaccgtcgccaaaggtaaaaccgcagccgttgcgttctgcgaaggcatcgcccgccatttcccgatggctggtcgggataacaaaacgatcttcatagttggcaatggcgagatagcgatacatctcttcgacctgggcgacgctcaggcctacttcgtcgatggcacgagtatcagtaacgccttccacggtttgactacgcatatagtggcgcatcgccatcatccgtttcagcgcccgcagtaccggaccggtatcgccggcactcaacatattggcgagatattgcaccggaatacgcaggctttcgatggcgggcagcacgccttcgcttttcggcaaaccgcccgcatctgcgtaggactgaatcggactcagcggaggaacgtaccagaccatcggcagggtgcggtattcagggtgcaacggtagtgccagtttccagtccatcgccattttgtagactgggctacgctgggcagcgtcaatcacattttgtggaataccttgtttcagggcttcctcgatcacactgggatcgtgtggatcgaggaacacttcgcactggcgttcatagaggtcaacttcgcgctcggtgctcgccgcttcctcgatgcggtcggcgtcgtaaagcagcacgcccagataccggatgcgacccacgcaggtttcactgcacacggtcggttgaccggactcaattcgtgggtaacagaagatgcatttttcactcttgccgcttttccagttgaagtagatttttttgtacggacaaccgcttatgcacaaacgccagccacggcatttatcctgatcaatcagcacaatgccgtcttcttcgcgtttgtagatagcgccgcttgggcaggtcgccacgcagctgggattgaggcagtgttcgcacaggcgcggcaggtacatcatgaaggtgttttcaaactgcccgtacatctccttttgcatggcctcgaagttgcggtcgcgggcacgtttttcgaactcaccgcccagcagttcttcccagtttggcccccagatcactttgtccatccgtttgccgtcaatcagactacgcgggcgagcagtaggaatatgtttgccttccggtgcgctatgcaaatgttcgtagtcgaaggtgaaaggttcgtagtaatcatcaatctgcggcaccaccgggttggcgaagattttggttattacgcccatcttgttgcccagacgcgggcgtatcttgccattcacatcacgcacccagccgccttgccactcttcctgatcttcccagtttttcggataaccaatgcccggtttggtttcgacgttgttaaaccatgcgtactccatgccttcgcgcccggtccagacgtttttacaggtcacgctacaggtatggcagccgatacatttgtcgaggttaagcaccatgccgacttgactacggattttcattttttcgcctcctgtacctgatcgcgaccttcatcatccagccagttaacgttcttcatcttgcggatcatgatgaactcatcgcggttgcttccgacggtgccgtagtagttaaagccccaggccagctgcgcgtaaccgccaatcatatgcgttggtttcgggcaaacgcgggtaacgctgttatgaatgccgccgcgcatgccagttacttcgctaccaggaatattcataatgcgttcctgggcgtgatacatcatggtcatgcccggcggtacacgttggctgaccaccgcgcgggcagtcagcgcgccgttggcgttgaatacttccacccagtcgttatcgacaatggtcagttctcgggcatctgtttcgctgatccagacaatcggtccaccgcgagagagcgtcagcattagcaggttttcactgtaggtactgtgaatgccccatttctggtgcggcgtcaggaagttaagtgctttttccgggaagccgtttggcggtatctggcgcatctcactgacgctacgggtgtcgataggcgggcgataagccaccaggctttcaccaaaagcacgcatccacggatgatcctgatagagctgctggcgtccgctcagcgtgcgccacggaattaactcatgaacgttggtgtatcccgcgttataggagacgtgatcgctttccagaccggaccaggtggggctggagataattttacgcggctgcgcctgaatatcgcgaaagcgaatcttctcgtcctctttgtgcagcgccagatgggtatgttcgcgcccggtgatctcgcccagcgcctgccacgctttgactgcaacatgaccgttggtttccggtgccagtgccagaatcacttcactagcgtcaatggcggtgtcaatcagcggacgcccctgtgccgggccatcacgcttggtgtaattgagtttgccgaggaaatcgatttcatcctgggtattccagctaatccctttaccgccattgccaagtttgtccatcaatggcccgaggctggtaaagcgttcatacgtagcagggtagtcgcgctccaccgccacaatattcggcgcggttttgcctggaatcagatcgcattcgcctttgcgccagtcgagcacttcacacggctgactgagctctgccggagagtcatgcagtaggggttgtaataccacgtcggtttctttgccaagatgacccacgcacacttggctaaatgctttggcgatacctttgtagatttcccagtcgctgcgactttcccacgccggatcgaccgccgcagaaagcggatgaataaacggatgcatatcgctggtgttcatatcgtctttttcgtaccaggtggcggtgggcagaacgatatcggagaacaggcaggtactggacatgcggaagtcgagcgtcaccagcaggtcgagcttgccttcaatcgctgcagtttgccactcgacttcttccggtttgatcccgtcgctggcaccgagttcctcgccctgaatcccgctttcggtccccagcagatacttctgcatatactcgtggcctttgccggaggagccaagcaggttagagcgccagacaaacaaattacgcggatgattgctgctgctatctggttgttcgcaggccatacgtaaatcgccgcttttcagcgcctgggcggtaaattctgtgggggataatccggccttgtcggcttcagctttaatcccgagcgggttacgccccagctgcggcgcagaaggtagccagcccatacgttcggcgcgaacgttgaaatcaatcagatgaccgctgtacttactggcatcggcgagcggactaagtaactcctgagcagagactttttcatagcgccattggctggaatgattgtagaaaaagctggtgctgttcatttggcgcggtggtcggttccagtcgagcgcaaaggccagtggcaaccagccggtttgtgggcgcagtttttcctggccgacatagtgtgcccagccgccaccgctttgcccgacacaaccgcagaagatcagcatattgatcatcccgcggtagttcatgtccatgtgataccagtggttaacacctgcgccgaggataatcatgctgcgcccatgcgttttatgggcggtatcggcaaattcacgggcgatggtttcaatatactggcgcggcacgccggtaatttgctcaccccaggctggggtgtacggtttgatttcagcgtaatctttcgcactgttttcatcttccagcccgcgatcgaggccgtaattcgccagtaccaaatcataaacgctgaccaccggacaggtgttgccatcgactaacgtcaggtttttaacgggcaattggcgcaccagcaccggattgtgttttacgctgcgaaaatgcggattttcaatgccgccaaagtaggggaaggccacgcctgcaacagcgtcatgttgaccgagcagggttaagctcaattcggtttccgtaccggcggcaatggattccagattccatttgcctttttctccccagcggaaaccaatgctaccgttcggcactaccaattcacctgcggtattaactgctacggttttccactgcggattgttgctttcgcccagtccatccaccaggtcagatgcgcggatcatgcgcccgggaacgtagctaccatcgtcgcgaggctccagcattaccagcatcggcatgtcgctgtagcggcggcagtagttgataaagtagtcgctgggattatcgagatgaaactcttttaaaatcacatggcccattgccatcgccagggcgctatcagtgccttgtttcggtgccagccactggtcgcacaatttggccacttcagagtagtcaggggtaatggcgatggttttagtgcctttgtagcgtacttcggtaaagaagtgggcgtccggcgtacgtgtctgcggtacgttagacccccaggcgatgatgtagctggagttataccagtcggcagattccggtacgtcggtttgctcgccccaggtcatcgggctggcgggcggcaggtcgcaataccagtcgtagaaacttaaacaggtgccgccaagcaggctcagataacgcgttccggcggcgtaagaaaccatgctcatcgccgggatcgggctgaaaccggcaacgcgatccgggccgtaggttttgatggtccagacgttagcggcggcaatcagctggtttagttcctgccagttggagcggataaacccgccgcgcccacgcacttgtttgtagctcaggcacttttgcggatcgttcataatgcttgcccacgccagtaccggatcgctgtgttgcttgagggcttcgcgccacagttcaatcagtcgtttacgaatgagcgggtatttcaggcggttagcgctgtaaagataccaggagtaacttgcgccacgcgggcagccgcgaggttcatgattgggcaggtcagggcgagtgcgcgggtagtcggtctgttggatttcccaggtcaccagaccatttttaacgtagattttccagctacaggagcctgtacagttaacaccgtgggtggaacgcacgattttgtcgaactgccaacgctggcgatagctgtcctcccagtcgcggttgctatgcatcacctgtccgtgaccatcggcaaaggtttcgcccttttgtttgaagtagcgaaagcgatccaaaagtttactcatgacatgactcctgctccaggaatgaattgggatctgatgccttgtcggatgcgacacggttgtacatcaggcatcgatctcttatttttggctgaacttccgccgaccataaaccagccaggtcagcagcacacaaacgatgtagaagattaaaaacactttcatcgcgccgaccggagagccggtcatattgaggctcatgccaaacgcctgcggaataaaaaagccgcccactgcgccaatggcactgataaagcccagagccgccgccgtttcggtgacggcttcttcatgagcttgctcatcactaccgcctttcatctttacccgataaatggttatctggcgaaagatgacggcgatcatctggaaagtagaaccacttcccagacccgcagtcagaaacagccccataaatacggcgtaaaaggcgatgaaattaccggagcctgtgcccggtaaggtaaggaacagcagggcactgaaaatcgccataaaaataaagttgatcaacgtcacccgcacgccgccgaacttatcggaaatagcaccaccaacgctccgcgcgatggcaccgataaatgggccaaagaacgccaggcgcagaatattcacatccgggaactgggtttttgccagcatggcaaaacccgcagaaaaaccgataaagctaccgaaggtggcaaggtaaagcaggctcagcagccagagatgcaggcgttgtaagacagggagctggtcggcaatactggcgcgactactggcgatatcattcatcccactccatgcggcgatcgtggcaatcgccagtagcggtacccaaatccatgcggcattcgccaggctcatcacgctaccgtcggcctgcggtacgccattgacgccgagaaaggcaaatacaggtacaaaaatgaccagcggtgcaaccagctgcattacacttacacctaagtttcctaatccgccattaatcccaagagcgctcccttgtttggcttttggaaagaagaaactgatattgcccatgctgctagcaaagtttgcacctgcaaaaccgcatagcaaagcgataacgataaatatcccaaaaggagtattcggattttgcacggcaattccgagccagacgcaaggaataatcaggattgcagtactaaaaaccgtccatcggcgtccaccgaatataggcaccataaaggagtagggaacacgcaataatgcgccagaaacggagggtaatgcggttaataaaaagagttgatcggtagtaaaattaaaaccgattttattgagattaacggtaactgcgctaaatagcatccagacacagaaggcaagaagtagacaactgacacttatccagagatttcttcgagcaatatgttttcctttattttcccagaaggccggattttctggtttccagtcgcgcaaaagataacgactatttttctcattttgcagtgccatattgttcctcacatgcacacattggtaatgaaaaaaagacaaaacacgaggtaaggcgcaatagccagttattagaattaaggatgaattgggtgaagtgctgattgaaagaatagataagaaagcgtaaccgcgggggcagaatggggattaagtagccagatatgtgttactaaatgtaactaacaagctaaccttcaaacggggttaatctttgaacgtatgtcatgtttcaacccttcagatcgtgaatctaaagggttacatattaactatattatcaacaagaccagacacttatagaattagtgatgatttattcattaaaaaggccaactactggaggaaaagcttctgtccagaaggtctatcggttcctctcttattgcctgattgtaataatcgttattacagtaagtattgtttatttcatctaaggtcatgtttttaacttttatattcatctggtttacaacttcctctgtcttgtaagtgtgtatattatatggggtatatgcttttttaataggatagtgaaacaattcgttatccacatctattccgtcagagtgaacttcaaatgcaccagggctaagaattgccaggccagtattaagcttaagtgctggggaaaacaaattaaataacatgagctgcatagtagggcaattgttcttcccagaaacatttaaaaaatttaagttttgctctgttttattatggggaataaagttccaatatcggatgtattattagtatcaatgtgggttattttattattgtccagtcttaaacttttgatagatggaagataagtcaggaaatcaagatttatatatttcaactggttgttagcagcgtttaatgtctgaacattgcagaagttgctatagaatattttaatttcagaaagcaaattgttgttaataagtaacgtattcaagttgggaaataagtcattgtgtaaacttgttagtttattatgggatagatccagcagtaagagttcatttttattacctgcaacaatatcagttaattgattatggctgagattcaggtattgcagccattcgcaagattctaattgcacaaactctagttgattatgtgccgcactaaaataagtaacactactaagcctatctatatcaatatttctgagagcattattattcatagatatatgtgtaatacttacatttctgccttgaggaaaatttatactctcaagagcattactattcagacttagctttacgagtctatcgtagttggttgcatcaaaatgtgtgaattggttattatcaagattgatagatgtgaagttttgcagccctggtggttgagtggttaaattaagtccacttaaatcaatggtcacttcattagtgtcatcaattatatttcttactgcagtccagtactgcatttgtgcaagtggatcattgttgatgccgttaactaatacatgccaaagatgtttactacttattagttgatcaatgtcattggttggcagtaaattgttattgcttaagtttaaatattccagttttgtagtgtttttggcgtttaaatgtgcaatatggttgtcgtttaaagtgattgttttcatcctgggatgattgtgtaatataaggtcagtgatcatattgtgatgggcacttaactcaatcagagattcttgccgcggctgccgttggcttcatcgttatagcctttaaaatcatattcccagtgaccaaaaccaatcatttgatcattgatttgcgtttctcctttaaagccgagacgggcataagttttatcaccatcgtcacgcttatcatcagtaaaataacgtagagcggtaaccttgccataaaggtcgagtttattaccatccttgttatagacttcggcagcgtgtgctacgttcgcagctaacaaaccagttacaaccaccgcaactatttttaatttcatttaacagaatccttttaattatcgttaaacgtattttctaaacgaattttaaacggcgtcatttataaatgacatactgtttttaaaatagaatggtgattaaaaacaatgagaaaaatagatgaaataatattatttatcgatatgtgatcgaagtcgaaatgagatataaggtgaattactggtatttgaaatttatttttttaatattgtcggaatttatctgattaactaccgggccgtagacccggcagttattttaaccacgacgtgtcgccagccagcagagcagggaaccgccgcagaccatcagcgcgccttgccagaagctgaagctcagcggggcgctgagcagcacggctgcaagcgcactggaaagtacaggcgtaaaatagctacctaccgccataatggtgacattgccatgcaatataccgacattccatgcagcataagcaaatcctaaggtaaatgccgcagagatgagtttaatcatgacgggcgtgctaaatatcatttctggttgtggcgtaagaaaatagtaaacccacagacttgctcccgttagcaggacaaaaacggtaattccattaaatccgcgtgcgtatttattcgttactgtgcaataggctgcccagataaacgcaccaatgaacgccaggaaataactcaatgggctggtggtgatattattgatgatttcatcataatgtaacccattgtcaccgcctaacacccaacagacgccgacgagggctaataataatccaggtacaatcaaccagttggttttctgaccattaaacagaatggcaaagagaattgtcaggctgggccacagatagttcaccatacccacttcaatcgcctgatgatgggtcgccgcataccctaaggaaagcgccagacagatttcatagctgacgaataacagactcccggcgagtaaatagcctttcgggatttgccgaatacgcggaaatccaaccgtgaagattaacagcagcccgcttaaactatagatagcagctgcgccgccgaccgggccgagcccctcactgacaccgcgaatcaatcctaccatcgtgctccacaggacgatcgctatcagccctatgagcgttgctttttgtcgtgtcatgctcgctgttttgtctctcttgccgttaaaaattaagctgaattttatagcatttttttaactggcctgtcaggcagtggtgcgtttttctaccgctattgaggtaggtcaatttgcgaaggcggattattttgtggcaaacagatgttctttttgatttcgcgcaaaaagattcagaattttactgttagtttcctcgcgcagtaatacccctgaaaaaagaggaaagcaatggacgtcagtcgcagacaattttttaaaatctgcgcgggcggtatggctggaacaacagtagcggcattgggctttgccccgaagcaagcactggctcaggcgcgaaactacaaattattacgcgctaaagagatccgtaacacctgcacatactgttccgtaggttgcgggctattgatgtatagcctgggtgatggcgcaaaaaacgccagagaagcgatttatcacattgaaggtgacccggatcatccggtaagccgtggtgcgctgtgcccgaaaggggccggtttgctggattacgtcaacagtgaaaaccgtctgcgctacccggaatatcgtgcgccaggttctgacaaatggcagcgcattagctgggaagaagcattctcccgtattgcgaagctgatgaaagctgaccgtgacgctaactttattgaaaagaacgagcagggcgtaacggtaaaccgttggctttctaccggtatgctgtgtgcctccggtgccagcaacgaaaccgggatgctgacccagaaatttgcccgctccctcgggatgctggcggtagacaaccaggcgcgcgtctgacacggaccaacggtagcaagtcttgctccaacatttggtcgcggtgcgatgaccaaccactgggtggatatcaaaaacgctaacgtcgtgatggtgatgggcggtaacgctgctgaagcgcatcccgtcggtttccgctgggcgatggaagcgaaaaacaacaacgacgcaaccttgatcgttgtcgatccccgttttacgcgtaccgcttctgtggcggatatttacgcgcctattcgttccggtacggacattacgttcctgtctggcgttttgcgctacctgatcgaaaacaacaaaatcaacgccgaatacgttaagcattacaccaacgccagcctgctggtgcgtgatgattttgctttcgaagacggtctgttcagcggctacgacgctgaaaaacgtcaatacgataaaagctcctggaactatcagctcgatgaaaacggctatgcgaaacgcgatgaaacactgactcatccgcgctgtgtgtggaacctgctgaaagagcacgtttcccgctacacgccggacgtcgttgaaaacatctgcggtacgccaaaagccgacttcctgaaagtgtgtgaagtgctggcctccaccagcgcaccggatcgcacaaccaccttcctgtacgcgctgggctggacgcagcacactgtgggtgcgcagaacatccgtactatggcgatgatccagttgctgctcggtaacatgggtatggccggtggcggcgtgaacgcattgcgtggtcactccaacattcagggcttgactgacttaggcctgctctctaccagcctgccaggttatctgacgctgccgagtgaaaaacaggttgatttgcagagctatctggaagcgaacacgccgaaagcgacgctggctgatcaggtgaactactggagcaactatccgaagttcttcgttagcctgatgaaatctttctatggcgatgccgcgcagaaagagaacaactggggctatgactggctgccgaagtgggaccagacctacgacgtcatcaagtatttcaacatgatggatgaaggcaaagtcaccggttatttctgccagggctttaacccggttgcgtccttcccggacaaaaacaaagtggtgagctgcctgagcaagctgaagtacatggtggttatcgatccgctggtgactgaaacctctaccttctggcagaaccacggtgagagcaacgatgtcgatccggcgtctattcagactgaagtattccgtctgcctagcacctgctttgctgaagaagatggttctatcgctaactccggtcgctggttgcagtggcactggaaaggtcaggacgcgccgggcgaagcgcgtaacgacggtgaaattctggcgggtatctaccatcatctgcgcgagctgtaccagtccgaaggtggtaaaggcgtagaaccgctgatgaagatgagctggaactacaagcagccgcacgaaccgcaatctgacgaagtggctaaagagaacaacggctacgcgctggaagatctctatgacgctaatggcgtgcttattgcgaagaaaggtcagttgctgagtagctttgcgcatctgcgtgatgacggtacaaccgcatcttcttgctggatctacaccggtagctggacagagcagggcaaccagatggctaaccgcgataactccgacccgtccggtctggggaatacgctgggatgggcctgggcgtggccgctcaaccgtcgcgtgctgtacaaccgtgctagcgcggatatcaacggtaaaccgtgggatccgaaacggatgctgatccagtggaacggcagcaagtggacgggtaacgatattcctgacttcggcaatgccgcaccgggtacgccaaccgggccgtttatcatgcagccggaagggatgggacgcctgtttgccatcaacaaaatggcggaaggtccgttcccggaacactacgagccgattgaaacgccgctgggcactaacccgctgcatccgaacgtggtgtctaacccggttgttcgtctgtatgaacaagacgcgctgcggatgggtaaaaaagagcagttcccgtatgtgggtacgacctatcgtctgaccgagcacttccacacctggaccaagcacgcattgctcaacgcaattgctcagccggaacagtttgtggaaatcagcgaaacgctggcggcggcgaaaggcattaataatggcgatcgtgtcactgtctccagcaagcgtggctttatccgcgcggtggctgtggtaacgcgtcgtctgaaaccgctgaatgtaaatggtcagcaggttgaaacggtgggtattccaatccactggggctttgagggtgtcgcgcgtaaaggttatatcgctaacactctgacgccgaatgtcggtgatgcaaacagccaaacgccggaatataaagcgttcttagtcaacatcgagaaggcgtaagggggcgaacagatggctatggaaacgcaggacattatcaaaaggtccgcaactaactccatcacgccgccttctcaggtgcgtgattacaaagcagaagtcgcaaaacttatcgacgtttccacctgtatcggctgtaaagcctgtcaggtggcgtgtagcgagtggaacgacatccgtgatgaagtggggcactgcgtcggggtttacgataaccccgccgatctgagcgccaagtcctggacggtgatgcgctttagcgaaaccgaacagaacggcaagctggagtggctgatccgtaaagacggctgtatgcactgtgaagatcccggctgcctgaaggcgtgcccgtctgctggtgcaatcattcagtacgctaacgggattgtcgatttccagagcgaaaactgcatcggctgtggttactgcattgccgggtgtccgtttaatattccgcgcctcaacaaagaggataaccgggtatataaatgcacgctctgcgtcgatcgcgtcagcgtcggccaggaaccggcttgtgtgaaaacctgtccgaccggggctatccacttcggcaccaagaaggagatgctggagctggcggaacagcgcgtggcgaaactgaaagcgcgtggttacgaacatgctggcgtctacaacccggaaggggtcggtggtacgcacgttatgtacgtgctgcatcacgccgatcagccggagctgtatcacggtctgccgaaagatccgaagatcgacaccagcgtaagcctgtggaaaggcgcgttgaaaccgctggcagcggctggctttattgccacttttgccgggttgattttccactacatcggtattggcccgaataaggaagtggacgatgacgaggaggatcatcatgagtaagagcaaaatgattgtgcgcaccaaatttattgatcgcgcctgtcactggaccgtggtgatttgcttcttcctggtggcgctgtccgggattagcttcttcttcccgacgctgcaatggctgacgcaaaccttcggtacgccgcagatgggacgcattttgcacccgttcttcggcattgcgattttcgtcgcactgatgtttatgtttgtgcgttttgtgcatcacaacatcccggataagaaagatattccgtggctgttgaacattgtcgaagtattgaaaggcaatgagcataaagtggcggatgtcggtaagtacaacgccgggcaaaagatgatgttctggagcatcatgagcatgattttcgtgctgctggtgaccggggtgattatctggcgtccgtactttgcgcagtacttcccgatgcaggttgttcgctacagcctgctgatccacgcggctgcgggtatcatcctgatccacgccatcctgatccatatgtatatggcattttgggtgaaaggaagcattaaagggatgatcgaagggaaggtaagtcgtcgctgggcgaagaaacaccatccgcgctggtatcgtgaaatcgagaaggcagaagcgaaaaaagagagtgaagaagggatataatctcttttgaactttaagctgaaaatggcgctgtaaaaggcgccattttcatattgtagacaacgtaggctttgttcatgccggatgcggcgtgaacgccttatccggcatgaaaacccttcaaatccaatagattgcagtgaacgtgtaggcctgataagcgtagcgcatcaggcaatgttgcgtttgtcatcagtttcaaatggcgctgtaaaaggcgtcattttcatattgtagacaacgtaggctttgttcatgccggatgcggcgtgaacgccttatccggcatgaaaacccttcaaatccaatagattgcagtgaacgtgtaggcctgataagcgtagcgcatcaggcaatgttgcgtttgtcatcagttctaaatggcgctttataaagtgccatttttttattgcgtaaccagacggcgtaatcggctcacatccactgttttttctgcctctgccagactccaggcgttttgcagattcagccacatttgcgggctactgccgatcaccacggaaagtttaatcgccatttctggcgtcaaagctgcttttcctgtcagcaatcggcttgccgtactgggagcaatttccattgctctggcaaactcgcgcaggctgacattaagttcgtccagactttcctgaataatgtcccccgggcggggatgattggccattttcattagtgtctttactctcagtagcgttccttcactgggaacactatcattattgttccttcctacgcaacaataatccatttagccatttcatgttggagagtgtgcgatgctgcgacccgaacatggcagtcgcagcaaaggcctcttagtgacggaaatcaatcaccatgcggccacggattttgccttcttccatctcagtaaagatggtgttgatgtccgctaacggacgcagggcgactttcggcaccactttaccttcggcggcaaactggaaggcttcagttaaatcctggcgcgtgccgaccaggctaccgaccacttcaataccatccagcacaagacgtgggatatccaggctcatagactccggcggtagaccgacagccacaacacgaccgcctgcacggacagcatcaactgcgctgttaaacgcagctttagctaccgctgttaccaccgcagcgtgagcgccaccagttttctcctgcacaattttggcggcgtcttcggtgtgactgttaatcgctaaatctgcgcccatttcggttgccagttttaactgctcatcattgacatcaatggcgatcactttggcgttaaagacattcttcgcgtattgcagggcgaggttacccagaccgccaagaccgtagatagcaatccactgccctggacgaattttactcagcttaacggctttgtaggtggtgactcccgcacaggtaatgctgctggccgccgcgctgtccagaccatctggcacttttaccgcgtaatcggcgaccacgatgcactcttccgccatcccgccatcaacgctgtatccggcatttttaacactacggcagagcgtttcgttaccactgttacagtattcgcaatgaccgcatccttcgtagaaccacgccacgctggcacgatcgcctggttttaaactggtgacacctggacccacttctgccaccacaccgatgccttcatggcccagaattacgccggttttgtcaccaaaatcgccattcttaacatgaagatcggtatgacatacaccacaacactccattttcagcagggcttcgccatgtttcagactgcgcagtgttttatacgtaacgtcaacatgatgatccttcgtaacaactgcagccttcatagttcctccttttcggatgatgttctgcatagcaggtgaggcaaatgagatttattcgccactacccagtatggatgagatctgaaaaagggagagggaaatagcccggtagccttcactaccgggcgcaggcttagatggaggtacggcggtagtcgcggtattcggcttgccagaaattatcgtcaatggcctgttgcagggcttcggcagaggttttcaccgccacgccttgctgctgcgccattttgccaaccgcaaacgcaattgcgcgggagactttctgaatatctttcagttccggcagtaccataccttcgccgttcagcaccaatggactatactgcgccagcgtttcacttgcgctcatcagcatctcatcggtgatacgactcgcgccggaagcaataacacccaggccgatgcccgggaaaataaaggcgttgttacactgggcgatagggtagattttatctttccataccactggattaaacgggctgcccgtggcgaccagcgcgttaccttcggtccaggcgataatgtcctgcggtgtggcttccacgcgactcgtcgggttagacagcggcatcacgatcggacgcggacagtgtttatgcatctcacggatgatctcttccgtaaacagcccggtctgtccactgacgccaatcagaatatctggttttacattgcgcaccacatccagcagactcagcacatcgctgtcggtatcccagtcactgaggttttcgcgcttctgcaccagtttggtctggaaaggcagcaggttcggcatcttgtcagtcagcaagccaaagcgatcgaccataaagactttctgccgcgccgcttcctcgcttaatccttcgcgctgggtctgggagatgatcatttcggcaatgccgcatcccgcactacctgcgccaaggaagacgatttttttctcgcttaactgaccacctgccgcgcggcttgctgcgatcagtgtgccgactgttaccgccgcagtgccctgaatgtcatcgttaaaagaacaaatttcattgcgatagcggttaagtaacggcatcgcatttttttgagcaaagtcttcaaactgcaacagcacgtctggccagcgttgtttcacagcctggataaattcatcaacgaattcatagtattcgtcgtcagtgatacgcggattacgccagcccatatacagcggatcgttaagcagctgttggttgttcgttccgacatccagcaccaccggaagggtatacgccgggctgatgccgccacaggcggtatagaggctcagtttaccgatcggaatgcccatcccgccgatgccctggtcaccaagccccagaatgcgttcaccgtcagtcaccacaatcactttaatattatggttcggcacgttttgcagaatatcgtccatattgtgccggttctggtaagagataaacacgccgcgactacggcggtagatctcagaaaaacgctcacaggctgcgccgacggttggggtataaataacaggcatcatctcatcaagatgattgtttaccagacggtagaagagggtttcgttagtgtcctggatgttacgcaggtagatgtgtttgtcgatttcggttttgaatccctgatactggatccatgctcgttccgcttgttcttcgatggtttcgaccacttccggcagtaaccccagcaggttgaagttacggcgttcttccatgctgaaggcactgcctttattcaacaacggaaattccagcagtacagggccagcgtaagggatataaaggctacgctgtttttttgtttttggttccatgtcactcactcttttttgaatatccatccctggggggcttttatcgtctttgctttaccgccagggcgtcggcctcaagtataaagcagataaaaacaaaaacaccattgcgcaggcaatggtgtttaatcgtcattgaggactgatggttatgaattacttttcagcggggcgttttctgccggttgggttatttactacgctggatttgtcaccttcggtaactattttgcgctggttagaaattttatggtccagtccaagaatatgacgtgcctgacggttgcttttcattttaactcctcaatcctgtagctagttttaaggacaacatcgccgtagcgaagaaacacgtgctaaacccctaaattaggttgccgatcaagcatagcaccttaaagcgtagggtgctggccactgaccacataattgatcgtttgctggtagatatcactgaggatgtcgttatcagaagcttcaacccatttggtcagctccatgagaatgtcatcttcagtgacaacaccatgctgtgcccgaaggccttgctcaatggcattaaccagagcgggttctgctgtactattttctgcctgataataagtaaacatagtgattctccgtgtctgtgtatttatggtgtctgctacggatcgcagatttataaagcacattcagcatggcaaatatttgccgcttcgttgttaagattagtcctggttgatgatttttatattttaacaccatgatattcatagggattgtgattggtatgatccgattaatattgatacaatatcttttgggttatatattcccggtaatctattgtgggaatttaatttaagtgcagaagtaatattttcgccggattttattcggaatatcctgcttatcctcgtgctgtttctcacgtagtctataatttcctttttaagcccacaggagagcaacaatgacaatccataagaaaggtcaggcacactgggaaggcgatatcaaacgcgggaagggaacagtatccaccgagagtggcgtgctgaaccaacagccgtatggatttaacacgcgttttgaaggcgaaaaaggaaccaaccctgaagaactgattggcgcagcgcatgccgcatgtttcagtatggcgcttagtttaatgctgggggaagcgggattcacgccaacaagcattgataccaccgccgatgtgagcctggataaagtggatgccggttttgcgattacgaaaatcgcactgaagagtgaagttgcggtgccgggtattgatgcctctacctttgacggcataatccagaaagcaaaagcaggatgcccggtctctcaggtactgaaagcggaaattacgctggattaccagttgaaaagctaaagcattgccggatgacgcgtcaggcgcgtgaatgcctgatgcgttgttagcatctttacagcgcccgccagcaccggagctcacgtccgtcctcccttattgctaaactttgccggacttcacatccgtgggttgccagcgggcaacgttcgtagaaaaaacagccttgcggcaacgtgcggtttcccggcagatccgttttacgtaatgcccattcttcctccagcggtttatcaatggcggggagggaatccagcaataatcgggtgtatggatgtgcaggtgccgtcagcacctgctgcgcgtcgcccagttctacaatctgcccgagatacatcaccgccacccgatcgctcatatgacgtatcacgctgacattgtgactaatcagcacataggtcagcccgtgattttcctgtagcgttaccagtaaattgaggatctgcgcctgaacggagatatccagcgcagaggttggctcatcaagcacaatcacgtcaggctggctagagagtgctctggcaatggcgatacgttgccgctgcccgccggagaacgcatgaggcaggcggtcgagatactccggacgaatacccacctgcacagccaactcctctgccaacgctcgccgctgttgttcactactacgcttagctatccagagcggttctgtgatgatgcgccacaccggtaagcgcggattaaggctagagagcgggtcctgaaacaccatctgcataatgcgttgactgccagaacggatgtactgcccgtggctcggttgcagcatacccattaaaagctgtgcgagggtgcttttgccgcagccactctcgccgacgatccctaaggtttcaccacggcggatctgtaaatcaataccattaatggcatgaacatgttccgtagttttaccaagccagtttttacgggccgggaaattgatatggacgtcgcgtaacgttaataacgtgtcagacacttataacctcctgctgcggataccaacaggcacagcgctggttgttgtcaccacacgctgtcagcgccgggacgttttcacactgtgcacctgccgcatagcaacgatcgcgaaaagcgcagccgtcaggcaaatgggtgaggtttggtaccgtccctggaatggcgggtaatagctggcgtggtactccatgttctggtgcgcattgcagcaaaccaatggtatacggatgccggggatgatggataacgtctgccgtcacgccgctttcaattacgcttccggcatacatcacgtaaacgctatcgcacagttggctcaccacggccatatcatggctgatgaacagaaccgcagttccactggcgcgggctttatgtttaagcaaacgcagtacctgcaactgcaccgtgacgtccagcgccgtagtcggttcgtcggcaataatcaattgcggctcgcaggagaatgccagcgcaatcattacccgctggcgcataccaccactaagctcaaacggatagcggctcataacttccacggcatccgggatttgcatctcttccagcaggtcaatcgctttagctctggcttcccgacgacttattggttgatgatggcggatcacgtccatcatctgaagacctattcgacgtgtcggattgaggtcggtcatcggttcctgaaagatcatcgccactcgtgcgccgcgccactgacgaagctgtttttcccgcgcgttaagaacatcttctcccagcagggaaatctgcccccgatgtacgcaataactgcccgtcggtagcagacgcataatcagcattgcggtgacacttttaccactgccggattctcccaccagaccgacaatttcaccgcggttaatctgcaaggacacattgttgagcgcgtgaacatcaccgttaaaaccggggaaactcaaatgcagttgttgaatgtccagaacgggttgggtcatgactgctttcctcctgctttttagttcaactctgctttcctcctgctttcgggtcaagcagatcgcgaataccatcaccaaagagattaaacccgacggcggtaagcaaaatcgctgcccccggaaatgcgcaataccaccactgatcgagtacatagttgcgaccatttgctaccatcgcgccccattcagcactcggttgttgagcacccaggccaataaatcccaacgtggcggccattaaaatcgcgctaccgatatccaggcttgcctgcacgatcagcggcggtagggagttacgtaaaatatgccagttgatcagatgccaacgagacgcgccaaaggttttcgccgcctgaacataggtatactggcgtacaactaatgcttgcccccgcgccaggcgcacataaaagggaattcgcacaatagcaatagccagcatggcgttaaacaaactcggcccgagagcggcagccagtgccattgtcagtaccaagctaggaatgctcagcataatgtccatgatgcgcatgatgatggcgtctgcgcgtccaccaagcacaccggatagacatccgagtaggctaccaatcatacccgcaatggcaaccacgactaatccggcgagaatactttgctgactgccgaccagtacgcggctaaacagatcgcgtcccacttcatcggtgccaaaccagtgcgccgcagaaggcggcaaaaggcgggcggttaaatcaatggcgttgggatcatgcgtcgccagccacggactaaaaatcatcatcaatagcattaatacaatgatgactgcgctggtcacggtgagcggactgcctttcagcatccataccagttttgcaccgttaaatcgcgtttgtttttgtgggcgtacggcggacgtttcctcgcttagcatcattcaccacctccacgtccgatacgcggatcaatccacaaatagagcaaatccaccaccaggttgaccagcacataagcaaaactaaccacgacggcaaagcccatcactgccgggaagtcgagcgcctgtatacttgttactacccatgcacccattccgggccaggcaaaaacggtttcggtgagcactgcgccatacaacaaatcgcccagcgccaaacccaatacggtaatgcttgggatcaacgcattgggtagcgcataacataaaacgatataccagccgggcaagccgctggcccgggcggtacgaatgtagtcttcactcaattgttccagcatcgcactgcggatctggcgagcgacaattcccaggtgaacgaacgccagcgttaatgccggtaagatgagatgttgcaacgcattgaagaagacttcaccgttgccttcaagcagcgcatcgagcagataaaagccggtaacgtgcgttggtggatccagccagtcatcaagccttccgccgccgggaagaatttgcagatgaccataaaacagcacaatgacgcccagcccaagccagaacgcaggtgtggagattccggtaatggccattattcgcaccagatgatccagccagcgatttcgccagactgcagagagtatgcccagcgggatgccaatcaggagtgccagcagcagggcaccaaaagccagctccagcgtcgccgggaaaaatatacgcaactcttccagcaccggacgcccggtacgaatggatgttcccaggtcaccatgaaacaggtcgctgacgtagcggtaaaactgtacatacagtggctggtccagtcccagttgctggcgaatattttccacgatagcatcgctggcgcggtcacccgccagtaaccgcgccggatcaccagggatcagatggctgataataaacgtaatcacgcagacgcccgccaccacgagcaccagcccccagcagcgttggcgtaaaatactccagaaggtcacgttatttactcatggtattgatattgaagacctgttccagcatgggattgaacacaaagcctttcacctctttgttcatcgccagttggtagtttttctggaacaggtacacataagcagcgtcatcaatgacgattttctgtgcctgctggtagtcccgggtacgctgcgtctggtcggtggtcgcaagcgcattgcgcagtaacttatcgacctcactgttttcatagaagctgcggttacccggcagaccttttttgtcactctcaaaccagtaattcataaacatatacgggtcggcaaaatccggactccagttgccaatcgcaatgtcgtaatcacctttacccactctgtcgcgcatggtggcgttcgccagcttttccagcttcacaatgatgcccagcttgttgagactggattgtgtcgccagagcaataggctcccagttcggatcgttatcggagtagagaaacgtcaggctggtgggtttgctcgtcactttatcccattcggctttggctttcgtttcgtcatggttgtattgcattgccgtcgcatcgtagccccacatgccttccggaatcgggccgcgcatctgttttccgttaccactcagaatgccgttaaccatgccctgataatcggtagaccaggaaatggcccgacgcagatccgcctgattaagaggcgctttgctgttattcagatacagataggtaacgcgcagactcggatactctgccacattgactttattttcctgcttcagggcgttgagttgatccaccggcagcgcatcggcaatgtcaatgtcgccacgggagagctgcaggcgacgggaggcactttcaccaataatttttacgcttacccgtttgaagttcggtttattgcctgggtaatgcggatttggcaccagaactaattgctgacctttttgccagcttttcagcataaatggtccggaaccggcggtattttgcgcgaggaagccgcgagcatcatccgctgcatgttcctttaagaccgccggattgataatggatgcaccgtcattcgccagcgtgtagaggaacggtgcgaatggttggctaagggtaaacttcaccgtatgttcgtcgggagcatcaatctttaaatctttgggaaatgcttctgctggcccctggccgatttttagtagccgctcaaaagaaagttttactgcttcggcagtgacaggtgtgccatcggcaaatttagcattatctttcagggtgaacgtccactctttttgatcgtcagacgctttccagctacttgccagatcgccttcaacgtcggtactgcctttatcaccgtccgttttgtactgaaccagccgctgataagacgggtaggtcactgtccagtcgttattatctattgttaccgccgggtcgagggtttgtggatcggcggccttaccaatcaccagcatatcttttggtacggcggcgtgcgcaaccgggaaatttgtggcaaggacgagcgcgagcaatgtgggacgaaagcttatgcttctcttcatgacagtttcctgattaactgacgtgctgtgtgccaggggatataaaacaagagaattgatcagcgagcagagggtaactcgctgcctggggtaattcgaagtgccaccattcgctggagataccgacaaaaccgccaccagtcattatcgcattcagcaacagccgattgcgctgagcggcgggcgggacggaagggtgataggcatgggagcgctcgtgcatttcatcgaaccctgcgcccatatcgaggatgttcccgtgctcatcacgaagcgtcaggtcgatcgccgtgccacggctgtgattagaaccgaccgtcacatcaacaacatattgcgggtctgggcaggcttgccacaacatcgcctgtgcttgttgtgggcgatacgcatcgtaaatcaccagttgtaacccactcagctgggcgatgctgatacttttcgccagcgcggtaatcgcatccttgtgtaacagacaacgcgcttgctgataaatagctttacctgtgatgttatcagcgcaggcgtatttcaattcgatctccagatcagggaagattacggctaaatcaaccagttcggtggtatcgctcataaacggttcctgtataagacaaaaattgctgcgctttccgcttatgcagatctcatgccatgccgggataagcgccagaatgctggcttaaagttatattttttaacttttgatcaacatttgtgcagcgtagtgcagttttggtgcaagaggggaagttaaggaaggaatctcccggaatcgtagctgaaatcacagtatttaagtgacagtgtcacgttaaatgaaaacccgcgagtgcgggcgagaggaatttgtcagattttcagcggtaacacgctgctcatccagcctggaatttcttcggcgggtagggggcgggaaaagaaatatccctgaataacgcgacagtggatcttgcgtagcatctcaaattgctctttggtttcgacgccttccgccacgacggttaaattgaggctttgcccaatgctggtaatggcttcaagtaaggcaaggatgcgtttttcggtcagacaacgatcgacaaaacttttgtcaattttgatttccgttaccggaagactgactaagcgggataatccggaaaagcccgtaccaaaatcatctacgcttaagcccacgcccatatcacgcaggatctgaatgcgcttaaagatttcggtatcgtgttccatcatcatgctttccgtgatttctaccgtcagctggtggccgtcaataccccaggcgtgcattgcatcagacacctgattaggcagttgattactgcgaaagtgcagcgcgctcaagttcacggataacgccgggatatgaatattctggctacgccattctgctaactgacggcaagcttccgcgatgacccagcgcccaatattttcgatttcaccaatctcttctgcgagaggaataaaccgactagggggcacatgaccatgcaggggatcgtgccagcgagcaagggcttcgatgccgtacagttcacccgtttctgcgaagatttgcggctggtaaaccagtttcagttggttattgctaatcgcttctttcagcgctgcgcctaaaaccaaacgctcttttaccatttcgttcatcgccgggctgaagaactgccagccgttaccgccattcttgcgaatataatccattgcattgtgagcagtggagagcaagtaatcgcggtttttacccaggtcgtagctgatgccaatactcaaggtaagcgggaagggtttatcgtcaatcattatcggcttgctgaccacattccgtagctcatcggcgatttgggtaatgttactgacgtcgttttcgaggctcacgaggacaaactgcgtaccttcgatacgacagagatactgatccggtttgagtttttcacgaaagcgattgaccacttccagcaatgcctgatcggcccacgcatagccaaggctatcaatcacatcctgaatatggtcaacaccgatgagatacaccacgggagagacggctttgtcgaccaggtcatcgaggtaattgtgcaggttattgcgatttggcagaccggtcatcggatcaaattggatgagttgttcaatatgctgacggcttttttcctgttccagcgccagcgcggccatatgctggctgatatctgccacgcgttcgataaaggcgctggtttctgctccactgctggttttaatttgcaggatccccgcaggcgcgccatcacgctgacgaatggtcgcactccagctttgcgcattttgaatttctgcaccgtgggaagaactcgcccagtgtatcggcatcccgttgcgcagtgcgaacaggctaacatggctttcgttgagtacagattcgatgttacgacaaatgatttcccccatttcatgaaatggcgggctgctgcacatggcggcgagaatattgccttcaagctggcgaatctgccgttcttcggtgatatcgctgaaagtcattaccaggttctgcagatgcgcgagcacgtcataaaccgggctgatagaggctttaatccagattttttcaccggtgcgcgtcaacagcagaaattcgtcctgatcgcgggcggttttccatagcaactgttgtaaacgaatgcggttatcggcagggaattcaggaatgttcaggagtgtatcgggctgcataccgctggcttcgctaatgcagtaaccaaacatttcggtaaatgcgcgattgcactgcacaatatggcgttccggatcgaggacaatcaccggtcggtcgagatggtcaacggcaataatcaattgtcgggtctgttctttttgcgccatttctacgctggcatcccgtaccagcgccaggtaataaactttcccctcggcgctcactttgcttagcgcaaaacgggtccagattttactgccgtcttttttctccagctgcagctcccgactcatcccctcaacacgcgctttaccgccttcacggttgtgacgaatgtattcaggatgcgcaggacgcaaatcccgcggaatcagcatatcaatgttattgccaatgacttcttcacgtttgtatccccagagcttctctgcggcggggttgaaaaacatcacttcatcattttcgttaattaacaccgcacccatcatattttgctcaagggcggggaaaaaaatgccatcggcggcattatccgcatcggttagcttcatgattacctctgcatcctggcgcatttaaagactggctttccagagttcaacacggtttctacctcgtcttttggcgatatacagagcttcatcggctatttgaatgaggcgctcatagtcaggatgaccattaaacatggcggcaccgatggaaagactgagggcaatatcttcgccgtttgcggctttcagtttggttttctccacccgactgcgaatacgttctgcggtacgtaacgtttcgttttcagaagcttcagtcaaaacaatgataaattcatcgcccccgtagcggaaaacataatcactactgcggacgttgtcataaaaggcctgagagactttacgcagaatttcatcaccagtgttatggccccacgtatcgttgatctctttgaatttatcaacgtcaataatcagcacactcagcggtgtaccggtccggttggcatgggcaatttcgcgtttgaagatagtcggtaggaaacggcggttaagtaatttcgtcagtacatccataccgacttcgtggcggcttacttcttcaaacaattcacgcagcaaggtaataatttggcttacggtatttcttatctgtaataaaaatttcacccgcagacttctgttattcaaatttctggtgttacgcatggtttgattgaaaataccgtcgaaatcctgaatcagacgggagatatggcctacttcggcaataccactaaaataatgtcgacctttatggttaaaccacaggccaaaatcagcctggcttaaaggcaaactactgcctaaatcagaatccagcaggattttatagataatatctatttcccaactaagtatactggctatttgccgttctttttcttcttcggcgttttccagtaagctgaagatacgatagttttcatcttccttactggcactactgtcactaaaggtaaacgcgcgagtcatcacttccatcgcgatatcaatactgttaatgctgaaatggtagacctgaagtttttctgcggcggaataatcgctagagaagatcaccggatagaggatttttttcagcacccgaaaccccatctcgacaatttctaccggaattcctatgcgggcatgcacttccgcgacggtatgctggatttgtattagcctttcgacatcgtcaacctgggcagaaagcacgttaataatccagcgttccatcgcactcttcaactgccgctcaacttgttcattactcaagaattcttcggcatgcgggtcgatgcggacaattcgataaaactcgatactcagataatgagcatgcgcaacggcaatttccgcggctttagcacgaatgggcggatctgcctgttcgacaagtccggtccactcatctttcattcttttaaaatacatctccataattcacacccttataaggctgggaaatcagacggaatcaaaatgaaacgcaacgtgcgagatcgactaactgcaccatattctcctgaaatatgaagatatactgaaaagaaataagcgatttaggacagtttcaatctacgctactgttcttcagaagagtatagcccatcgtaattatttttcggtgacagcgaatatcgtatggtttttcatattcatacatttttattagggatttatggctgtttaactaagtgtggttaatttgacttaagtaagcatgattattagtgggatagtttaagagggtaacaagccggtgggtaaagcaccggcttgttacaaagtaagaatgggagtttaactgccccagcgactttgcagatagctgaccgcttgttgagtctgcggtttattcagatagtcctcacggaacaagatggtgccgctaatttcgggcacagcatcgttaagatcgagctgctttttcagttccggtacgccgccgttaatcatccagtctggctctatcttactaggttcacccactttatagaaggcgataccgatatacaggcgggtcctggtcggtttaacgacatccgcccaccattttgccaacacgtcataacgcgcggcactccgactgaacggccagtaaatttggggagcaatgtaatccagcaatccttgttccacccatcgacgggtgtcagcgtaggattcgtcataggctgccgcgcctcgggtatcggaaccgagcggatcgtgacttcggttacgccacacgcctgccgggctaacaccaaattcgactcccggcttaatgcttttaatggtgtggcttacctttgcaattaactgctgagtattgttgcgccgccagtctgctttactcgcaaatgcgcctccgtatttacggtacgtttcgttatcatttagccgactacccggactctccgtatagaaatagtcgtcaaactgcacgccatctacgggatagcgggaaaccacttctgcgactatacttgtgatccagtcctgaacctcagggatgcccgggtcgaggacaaagcgatcgccagacgttctgatccagtcgcggtgttgcacatagacgctcgccggttgttgagacagagtgctattcagttccctgatagtaccgggcttcgtattaacgcttacgcgataggggttaaaccaggcgtgtactttcatcccacgcttgtgggcttcgtcgagcataaattgcagcggatcgtaacccggattttcaccaatcttaccggtcataagatcggaccacggcaaaattttgcttggccacagggcggtaccgtccggcttgacctggaaaaagaccgtgtttatgccgagacgttgcagatgatccagtttgtcgatcatcgcctgttgttgtacacgggcccggctggtggggttactaatgttaacgctggaaaccggtggccagtcgagccgagaaaccgtggccagccagatgccacgcatcggttgactgctttgttgcgtcgtggctggtggcttactacctgctggtggtgtcaccatggactctggaggcgtgcttttacaactacacagtaaaagtgccagtgcaactagtatcgctggtcttctaatcgttaatttcttgtttcgggagcagatatccatatgtgctggtttccggtaaacagatgtgcgctcattctcgtacttatccccgttaagtcaatacgacagcaagcacgaaaaagggagcgatgaattatcgctcccttgtcttataaccattcagacatggttagtgtttcttgtcattcatcacaatatagtgtggactacgtgcacgcgggtgcaggaagaagtgaccttttggtgcgttctgactgttgattggctccagagtgacgccggtatttgctttgcctttacgatcatgaacagcatagagaataaagggcagggcaagtaccaccaggaaactaacaaccagtaattcaacatacatatcggtagaatcaccctggatgttatccggcggcaggaaggaaacaataaacgccataatactagtcagcagaccgacaattgccacgaccagtttcacccctttaccaccagggatattaaatgtgcgttttaagtcaggatgtttaagaaccaacacaatgtagccaataaacagcatgaaataagcacacagataaatcaccaccgtcagcgccagtgcgatcaggaaggacatgttgttaccgccaccggtattggtgaggatgatcaacgcgatagacgtaatcaccagctggctaatgaccagcgttaccggtacgccatttttgttcattttagcgaatgccgctggcagcaggtttttctgcgctgttacatacatcccgcgagaaggaccaacaatccaggaggcgatttccgccagaacacccagcaacagcagtgcggagatcacgcgaaccgtccactcaatttctggtgccacatgggacatcagaacggtaaaggtttgcattacccctgcggagaggttgatttcattacccggaatgaccatcgcaatagacaaaccaccaacagagcttaagcagattgccgccaccatcagcagtaacatagccaacggatagtcgcgccctgggttgctcatttcattgacgtgggttgcggatgcttctacgcccatataactcaaaatgaaggcaacaaatactaccagggtgcccactttagagaagtcagggaagaaggtcttgctatccatttcgatagcaacgggggcaccggagtgcagataaatagccgctaatgcgatcaaaataaatgcaggtaacaggataccggcgaagaagccaactttagcaattcgcgccgtgtatttcgtgccaccaaactgcgttaatgccagcgcccaaagaatgatgagtgctgcaatagttttggtaatggggtcttcattcagcgctggccatttcaggatgtaggagagtgcccctaacacgaaatagagcatcggaataaaaccaatggcgatttgcagatagccaaaactgatcgctgcaaatccccatctcggccccagagtattacttacccaggcgaagacaccaccttcttcccagccgtcgacggtggccatttccgcagcacaaagtcccacgggaataaaccataaaatcccgcctaatagcaggaagaagactaaactaaagccgcttgttgcgaaggtagggtattcataaacagccattaccatgcttgccgttatggcaaagaatccaagtaatgtgagctgcttagctttacctgtctgtacacttgtagccatattatccccctaaaacggtattcctgtcggaaccgcacctgttttgttctgaagcgtattcagaacaatattttccgttgctaatgccagtgaacagactttggaaattgtcccgaaacgggttcgtttcgggacaccgttaccgttaaacgttatcaggtatgtttaaagctgttctgttgggcaataccctgcagtttcgggtgatcgctgagatatttcagggaggctttgtagtcttccagcaacagttcagcaaagtccatttcgaagccgcgacgacacataatgcgcatcaccacgatgtcggtggcttcaccgccgagagtgaaggccggaacctgccagccgcgcagacgcagacgttcagagaggtcatacagggtgtatcccggatcttcaccatctttcagtttgaagcaaaccgccgggatgccttcgtccgggcgacccgtacagatgaactcatacggccccagtttggcgatttcatccgccagataagcggcaacctggtaagaggcgttctgtactttggtatagccttcacgaccgaggcgcaggaattcatagtactgtgcaattacctgacccgccgggcgggagaagttgatggcaaaagtaccaatttgaccacccaggtagtcaacgttgaacaccagttcctgcggcagcgcttcttcgtcacgccagataacccagccgcagcccagcggagccagaccgaatttatggccactagcactgatgcttttcacacgcggcaggcggaagtcccagacgatatccggggcgacgaacggtgccaggaagccaccgctggcagcgtcgatgtgcatgtcgatgtcgataccggtatcggcctggaatttatccagcgcatcgtgcagcggttgtgggaactcatagttaccagtgtaggtcacgccgaaagtcggcaccacgccgatggtgttttcgtcacaggcttcaatcatgcgtttcgggtccataaacaactgaccggggcgcatagggatctcacgcagctccacatcccagtagcgggcgaatttatgccagcagatttgtaccggaccgcacaccaggtttggtttatccgttggtttgcctgcagcttccatacgcttgcgccaacgccatttcatcgccatcccgccgagcatacaggcctcggaagaaccaatggtgttggtgccaacggcctgaccatttttcggcgcaggcgcatgccacagatcggcaaccatatttacgcaacgcaggtcgatggctgcggattgcggatattcttctttgtcgatccagtttttgttaatggataaatccatcaatttgtggacattttcgtcgtcccaggtctggcagaaagtggccaggttctgacgagcgttgccatcaagatataattcgtcattgataatctggaatgcgacatcgtcgcgcatttcgtgcagcggaaaacgtttactttctgcgatagtggaaatagacttcgcaccaaaacgactatcgagtagttcgctccttaaatccgttacttgcttcttatccattttaaactccttaaaatgattggatcgcattaaaaaagtaggatttatcgataaagtaagcaagtgcaaaggactcgtgtttaaataacaaaatcctaatgttatttatcgtgagatattacgcgaataatattttttcattgaaaaacaatacaatatgaaattcttgggtggtggtaaggtgttttatgctgttatttttatgcgcattctgtgtctcctgaattatcacgtaaaaatcagaccttaaaatatcactattagtacttgattattattttgaacgcatttataaaattattacataaaaatagcgaatattgctaaaatccccgccaacgatgtgttgacggggctgttattattttggcaataatactccggtataagtatttaccggatgagaaagatattgtttaacggcagtgttaacattctctaccgtcatttgtttcaacaattgctcctgctcagtccatgctgcaggatcgtcatattgaataagactatttacaatagtgttcgctaattgttgaacgctacgctgttggatatcgaggctgcgctgaacgttttgctggtattcattcagttcttgctcactgatccctttagccagacgcttaaccatcacttcattcgctaacgttaacagttcatcatgtcgttctggttgacaagtaaaagccagcaaatgactgatatctttggcctgaggatcaacgctgaggcgagaagaaacgctgtatgctccagatgcctgttcacgaatattaacacgtagatcttttgccagtgcgacgttaaaagcatcgagcgccatacgcgtcggcagattaacaggtgtccgggaatcataacgcttccactgactaacctgtgccacaggttcattttgttcttttacagtaacgcttgcgttgtccgtcgcgcgagttaatggtttacctgcggctaatgggctatcagagtgtttgatacttcctaagtaacgcgtaattaacgccacgagtttgtcttctgcgacattaccgacaatgacaaacgtgatatccgctggagaactaaacaattggcgatcggcagccagcgcatctgcggcagtaaactgtgcaatctgattttcttgcagtaatttcgtgcggtcatcagcatagcgcgtctcatacatctgctgggcgaatttctccgctggacgctggtcgagcgttttcaacgcctgaatttgagcattttgtaggcttgcccaaatattatcgttaatcgtgctgtgggtgattcgctggttaatcaactgaaaaccaggttcagggttattagtccgcgcgctaacggagagcaacgtattcatgccactgactttactgctcatggttacgctattttccgcactccagcgtttcaggctggaagaggagagttcgccaacgccgcttccgctaactgctttatttgccagcgcgataagacttttttgctgcgcagggaaacttaaatcgcctttattgcttacggcaataatttgtagcttttgctcttcacccgcggattttgccagaataaccctggcaccattggaaagtgttaaacttgtcagattctccgccagcgtttctttgctgctaatttccgcctgtgggtctgcgtctactgttaagcttaaatttctgcctgggaagacgtaagccgccagctttttgttggcgtactccttttccagcgccaggatagccgcaggagacaatgcttttttggcggcaacctcattgtttaccatttgctcccaaaatgcgtcctggttctttcttaactgctgccatttttccgccagactttgcacggtaatttgctgccacagacgtttgctaagttgatatgtctcttccgggctcaagaacggcgtattatttaaactgctggatgccaggcgactggtcagcatacgtaaatcacgttcagcttgctgatcaaccgcatttttcagccaggtgaggcgggtagatttgacatcatcgagttcttcagcagaaaaaccatgctgatcaatggttgccaactctgccattaatgcattcgcagcatcctgcatattatcgtctcgtgcatttacacggaaaaacaggctctgataatcgggtgcaattttaacgctgcgcgcagtgccgccagaaatagtcttcaactcgccgctctgtatgcgttcctgcagacgttgattgaacagctgaactaacatgctccattcagcttgttcgataaagctttgctcatcgttcacttgtaccattggcaggcgataatagagtgcgatgccgttcacccggttttctttatcattaatgatattaaagcgcaggtggttttcggcttttgtcggccagacgcgattttcagctgctttgttagccggaagcttacttaaattatcctttatcagcgccagcgcttctttactgtcgatatcgccgaccacgataaaggtcatattatttggttgataccagcgttgataaaattggcgcaattgtgccggtgtgaccgtggcgacagtatccatcaggccgataggttcacggtctaaattacgggtatttgccagcaggaaagggcggcgcgcctgagaggtgcgccatttcgcatcctgatgggcacgccattcctcagtaattacgccacgttcagcgtctacttcgagtttttcaaaggttgcggcattactccattcactgaagattgccatcacttgttgcagattttgtttctgcgtagtcggcaaactcacctgatacaccgtttcgtcatagctggtataggcattaacatcgcgaccaaaacgcaggcccatactctcaaatgtttcgatgactttattacccggccatgtttttgtgccgttaaacatcatatgttctacaaaatgagccacgccgagctcattgtcttcttcctgcaaactaccggtatgaatttgcagccataaatttacctgatcctttggatgagcatgcggataaatcatatatcgcaagccattgtccagttgcccggtaattaacttttcatcctgcggtaaggcggcggcaatcagccgcccggggagcaacagagttgccactaacgtcagtaagaaacagaggtttctcataattatctccatgcgaaaaccgggcgaatttacccggttaagtaaaatccgaactattaaaatttcatgctgacatcaagccagaaagtacggccactggcgtaggtcgccacaccggtgttcgttgtatcaacagcggttttgctatccagtacattgagaatatcggcactgatcgtcaggttttgttgttgcagaaattgtggcgtccaggacaagcgggtgtcccaggtcaggctgctatccagtttttcgtcaacatactgcttgtaatcactatattcgctgatgtattgcgcatttgtcttaccaaggataatgcgagctttacgcgcttcttgccaggccagcgtattcgcccacactaacccgctcggttgatgcgtgaaatccatgtttaaggagatctttaatgggttattaaaatctgccactggaacgctatcgtaagagaccagattaccgttataaaccacctggttatcaccggtattgctctcctcataaccattgtttaagctcaagttgcccttgctcttgatatagctaaagacaatttgtgggttaatatctacctggcggatatgcaggggttcggccagttcaaaactgaggctgaagctatgcgttttggttttgccatcgttgttatattcagtaatggtggttttagtcgcgctgtcggtacgactgcttttgctgatttgatcatgcgcttcacggtaaacatagtttgcacgcgcaataacgttcttaccgattttctgctgcaatcccattgccagttcatcgttataaggcgttttcaaatcctgataacgcgtcagagttttattaccacttacgctttccgtccagctattgcggatatcacgtaatcccatatcaagaatattcccgccatagtaacggttataacctgctgtaatcatactggtttgattagcaaaaatatcccattccgtcataaagcgcggggagatattgtggttactcagatagttgtcatagtcataccgcacgccgggcattaaactcacattacgccagctaatgcgatccgccatatacagcgtgtagttgtcaattcccaggcggcctttacctttatggtaaatggtatggttagttttctttccggcagcattaatcacataggattcagactggttatggcgttcagtccacgcatcggaatagatgtattccgcgccgaagtagggttgatggctaacattacccacggcgaatttttgccagtccaggcgtgttttgaaggtgtaattatctacagcctgggaaatgtgtcctaatccgccacgggtgcaacgccctgtaatatcaccatatgtacaactaagttcggtgtaccagatgtcatgatcgtgacgggtataatcactaatatgatcccaaccaacggtggtacgcagtttggcccatgcgagctgcgtatccatatcccatgccagaccataggatttattacccatttcgcgatcagactgcgggaaggtgctggtattataatcacggctggagccggtatattttaaggttaaatcgtgggtaaagcggtcgctggcaaaccaggtaaatttgcttaatgcagtatcgataacgtttttatactgtgcccgaccggcgacaatgccgtcattgctaacataatccgcgcgggtgatatcagactggcggcggcttaaaccggcggtaacgccgaagttatcagcgagttcctgattaaagctcaaggtataaaagttctttttaaaatctggggagtaataagtacttccactagagccttgattaaatgcgctcttgttattctcatcgatatggcttgttaaccagtcgctacgcgtagtgcgataacccaatttcaccttgctatcatcagcgttgaagcgtttgatctttgcatcaattaccccgccattgaagcgaccaaattcaaccggcacaaaactgtcataaagcgtcacattgtccagtaagctgacatcaagataatacccctgactcatcccgctaatattggttgcactactggcatcggactcattcgctgggttcaggttattagttgcactaataccgtcaatcaaataggcattctggtaggggctcgcaccgtgaatagagattttctcagggcgaatatctccctggttcaagctggtactttgcgtactatccatgcgtaccgcagggttggttctcagcagatcgctgatattgccattcccggtcggtaaacgctcgatgctttcactggtgtaatgcgtgttgccgtttacgggtacagggacaggagcatagaccgtcatctcttcaaaaaaatgcatgtacatgtttttgtcatcgacggcctgcgccacatcagcgccacataaaatgacgccaggaataagaactcgcttcatttatttatatctccgtacagcagggcttttattgtttttataaaaccgcgctaatgtcacaaatatcatcggccaggttccagacaccgggttgatgtgtaaccataatgacgccgcttgtgggtagtttttcacgcactaaacgcagtaagcggatagcctcttgttcctcaagatgagaggtagtttcgtcaagaaatatccatttcggacgtcgtaaaattaatcgtgccagggcgatacgttgtttttcgccgctggaaagaatatctccccagcgatcgtggtcatgaatacgcgcagccaatttcccaagaccaacctgatgcagtacttcgctcaagcttttatcgtctacgggcaggggaagtgctttacaaataatctctttcagtaagccggttttgattaacggtgtttgactcacataccaactgtcagcaggagaagaaatatcacctttaaaccacggccagcagtgggataatgttttaagcagtgtggtttttcccgcgccagagtagcctttcagtaatagccatttgcctgggctaacatgaaagttcaggttctctaatatgatcttattatcaggcgtacgaatactcgcatcagccacttgtaccgcatgttggcaatttttaggcttattcgtagggcgctgttcagtgagttgatggaactcatacaagcgatcgataaccgcagccagttcagcaagttcgtcatatttataaataaaccagcttaaattgttgcttaccagcataaatgcctggcggcttttcatcagtccgcccagattgatctgcccgctaataaactgcggcaataacagaaagtagggaagaacgctaaggctgcggctataaatattctgccagtaatcaagccaccgctgacgattcattaaacgatgccagttctctttaatggtatgaaaattgtcgctcaactcctggcgttgtagagactcagcattgcttagcgcaatcagttctgcctgcttattatgctgcacaagatttgttcgaaatgtcgcttcgctacgttgtttttccacattaagcggacgaatacgtttacccaccttatgggtaaataaagttccaccgatcacaatgagcacgacggtatagaccatatacccctggatattccattctgttccaccaacagtgaaactgagcgtacccgcgctttcccaaagaataacggtaaaggtgatcagcatgctaagactctggatgaagccaaaactaagactgagcgttttgctgatcagtaagagaatgtcttcagcgatacgttggtcagggttatctgtatttttatgctcgccgtagatctgcgtgaagtagtagtttttatctgcaaaccaccgattaaggtagtaatctgttaaccattcgcgccagcgaatagtcagtagtttaattaaccatgttttgtttacggatattaatacaaagatccccagcagggcagggaaccaaaggacaagctgccaaagcttatcggtttctttctggcttagcgcattgaaaaaatcattattccagtcgtttaaccagacctgaattttaaccacgccaaggatcatggcgaggataataatgattaacaacacactagttttattattcttacgcagccaaaagggcttcaacagacagagatactttgctatcaacatacgaagcgtaatgggaatggttatcattagcgaaaattgattgtgccatccaatgattatctatggcaatgatttactgatgaaatttatttaagtatcatttaacaatatgaaatataaaggaatatttcattttcagtggttatggttatgctattgataatcaaggatattgctaatgccctgatgcataccacgtaagccaggattttcgcaagggaagatgatgatgacgaaacacccgacaggaatttatgtcgggtgccttgttaaggtcataagaaggaggctaagaatggagttaaaagagagcgttattaattattctccatttgttttgcaacatccataatgtggtaaagcggtactctgttcttagctaactctaccatggcgttcatataaggtaccatggtactaaaaaggattttataaccttcgcaaaaataagaaacagtctcattgtttactttagtaatacgatgcttaggacaaccgccattgcagataggtttatatgcacattgctgacatttcgctggaatccgttttttttgcgctgtcagttgtacactgttcatcgttttgagttcagatttattaatgtttccaattttgtactgtggatagacaaaatggtcgcattcgtaaatgtctccattactttcaacaaccagattatccttgcaggactcctggaaaatacaactggtatgcccattccccaaaaaacggctgacaaagctttcaaactgacggatgaaaatttcacccacatcgtttttaacccattgcataaaaatggtactcataaacttgccataagccgtgggaggcacagaaaaatcaatgatacggaatgtgttctcactatgaccactgaaatcaatattcggcgtcccggtttctagcaattcgataaattgcatatgtttactgccgatagattttaaaaaatgataaacctcaagagggtaatggacattaacgttattaatgacggttaacgtattaaactctacttgataacttttcagacgctcgatggctgctatcacttttgcaaaagtaccgttaccactattactgcgtctgtaacggtcatgtaactcctgggggccatcgatgctgataccaaccagaaattcatgttctttgagaaaggcacaccattcattattcaataaaatgccattcgtttgtaatgcattaaaaatacgtttttggcctgcatagcgttgttgatagtgaataactttacggaaaaaatccaggccagccagagtgggttcaccgccttgccaggtaaaatagacctgattgccagacgctgcgatatattgtttgatgaactctttcagagtgctgtcatccatccatttttcatgagtaaactggctctctttttcaaggtaaaaacagtaatcacatttgagattacattgaaaactggagggcttggctgtaacgtgcatcgctatctcgctcaataaggcggcggaaaaatccgccgcatgaaggtttagttatttcgcttcgcttagtgctttcttgatattgttaaacttctcctgatttacctcgctaagcggtggctggctgctgtcgataaactctcttaccacgccttgcatctctttaacgacctgcggattggcggcggcaaggttatctttttgctgtagatccgtcagtttgtagagacctaactgattgttttctactgtatagacaaggctataatcgttatttctcaccgtataagagaattggcttaagtcctcagtgttggggttatgcgggtaatcgtcactctgatggcgaacaaatttgtggtaattatcccagaatggaatattttcctcgtcaaaccagtgagaataagaggttatccaggtcagatttttatgtggctcgccttgtttcttatcttgcaaccagggcagcaaggaaacgccatccagcttaaggtcttttggaatgctgatatcggctgcatcaagagctgtcgggtagaaatccattgcggaaatcagcttgtcataattaccgggttgaagttttcctttccaccacataaacattggggtgtgagtaccgccaggataggtctgactcttatagcctttttgcgccccgttcagcggcagaggaccatcgataaccgcaccattatcggaggtaaagagaataattgtattgtcatactgtccgtttttcttcagttgttcgagaatgcgttttacaccctgatcaacagaataaacggaagcgtagtagttatctgctgtttgactaccggtattaaattgcttctgatattgatccggtgcaggattatcatttggcaggtgcggagcattataagccaggtaaagcataaaaggctggtcaagtgttttggcacgatcaacaacgccaattgcctcatcggttaactgatcgctgatataaccttttgcggggacacgttcacgatttttgaacagactaggggagttgtaatatgccgttcctgcagcgtggaatcccataaagtaatcaaagccacggttttgaggttgccattcttccgcagaaaatgtggtgaagttgtcatgatagtcacgcgtttgtttatcttccggtaccggcacattactgattttactcaagtgccatttacctactgctgcagtgtaataaccatgattctggaataattcaggcaagaaagtttctgttagcggaataccatcctgagcatcggtattggaatagacaccaaagcgggcgggagctcgaccggtcattattgcggcgcgggaggggccggaaacaccgtgtgccacatagccgttagtaaaacgtacgccttcatccattaaactaaggagcgtcggcgtacttttttgtgcagcttcaatggctttatctatccctattttgtaggtatcgacaacttcacgattttccattgtttttgggtcaaaagatcccttatcaaaaggaagttgtccataaccaagatcatccatggtcagtacgataatatttggctttcctttggtactgtattctgtcggcgtaaagtcactgaaagcaacgtttgttttggttgctttcagctttacatcatctgccgcatgagcagcaaatgcagccataccagatgccagtatcaaagatatgctggtacttacgacacttttctttaatgcagacttcataaatgttcctcttcttattgtacttaattccaaagtaattttacgaagagaaataagtggatgtaagtgaagttagtcacataaagagatagcagatttagctaaaaaaagggaaaaaacagtccataaagcgttgacattactttctgttctattaagtaatttctcgccgataaacaactaatttattgatatttaataaattattgcattttactgacaaaatgcagaattgagatcataaataatcatgcaacaggttatgcaagtgcataaatatgtgatggatgtcacttatttatttcaataaatatatcgcctaaaaacaacgcggggcagggaatggctgccccatttaattcttacgcagcgtgtgtggttgactactcgttagcaaataatcaaatagctaaagcattcatcgtgttgcccgtattcatacccgtgtgactttgacaacggtactccttagaaactctcttcggactgttgccgaaatgtttgcggaacgcataaataaaataagatgtactggcataaccacattgttcggcaattttattgacactaccttctacgcgtatcaaattttttgcgtgctgcattcttgcatctaaaagaatctgactgaatgtcgtttgctcttgcttaagttttttcttcaacaggctttcactgatgtacaggcagtcacaaatatctttcagcttccatgggtgcgccggcttcatgttgacaatatttctcactttcccagaaacggatagcacaccgttagttaatagtgtaatgaaacctttgcatgcggcaaaaatagacaggcaagaaaaaagcaaaagttcactaaaattatgatgattgcgttcttcgctgttgagataagcaatcatttcattaagcaatccagtcggtacattactagcacgtaaaaacttcgcaggaacaggcaccgtcactgtctggatgttagtgcattgtagatattttttaatggtattttcagtaaatccgatctctttaaaatgccgctcataaggttcaaaatgcgtacgaacagcgttatctaccatcaggatctcgccgtcagagaaggcgtaatctttatctaaaatgttagcgttgaaggcatgatgaataaatataacagaacaaacgaggctcattttatctccttaaaacaataaagtttttatcgatacttttttaacatttcatatttataatttgctgtttgttttcagccttgcaaactattgataatgaaatgtgtaagatctcttgcaatgcgacccatttctgaaatactcagctgatcaattgccgaaaaaatggctatcaacgtaagtgtcagtaataagacaaccacaattgcagacatgatttctttatagttgtctctttgcgtgattttgtttttcactgtggtcgcatgcatttcaaatatgtttatttagcggataacgttaaaaatcgttaatcagtatgcttaatataacaggctggagaaaagaggaaataggactggtgcttcagtactgagcggagtttcttacagctgtaggcagaagtttatatcttatagtatgtagtttaatttaatccatgtgagcaaattgcgaaataatagtcaatgaggaattcttctgctgtgcggatgacagcagaagaaatgagaagaggcattaattacttggttctaattcaaccggaatacttttatagccaggaatgccacttaatggatcgtggttatcaagtgttagcatgtgattgctttctggaaaataggtcaccagactgcggtcagccatagggtaaatgaccacttttaatctatccatgcggcgactgctgcgcttaccgtctggcgtaagcgcaataagattaactctttcgccgttttttacacggcaaattttagcttgtttagcactcataaagaccacatctcgttgaccgaatacccctcgatagcgatcatccataccataaatcgtcgtgttgtactgatcgtggctgcgtactgtcgccatgaccagcttactgttaaacgcactagagggatcttctaacagccctttgctggtaatgaaattagccttaccactcggcgtcatccagcgcctttcagcagctgcatttatcaggtgaaaaccaccgggatgacggatgcgctggttatagtcggcgaactctggcagcacagcttcaatgtcattgcgaatgcgatcataatcttccaccagatactcccaggctaccacgctctggggtagtgctgcctgcgcgattcccgcgaccactgcacactcacttttcagcattacaccggcgggttttaacacgccacggctggcatgaatcatgctcatactatcctcaacggttaccgcctgcgcaccgtttttttgcatgtcaatctcgctacgtcccaggaccggcagaatatagctatgccgtgcggtcaacagatgagagcggttaagcttagtggctacgtgtaccgccaaatctaattgcgttaacggtacagcgctcgcttcccgatctggcattgccagcgcaaaattgccccccatgcagatcaatgctcgagcctgccccgtacatattgcttgcatgctggcaattgcagcatgtccaggtgcatgaggtggggtgaagccatagcgctcacccagacgagccagaaactctgcagacggtttctcggtgataccgacggttcggtcgccctgtacattagagtgtccacgtagtgggcagatacccgcaccaggcttgccaatgttacctttcatcaacagcagattgaccagttgctgtacgttctgggtaccatgttcgtgctgagtgatccccattccgtaacagataatggtgcgttcggcagcggcatatgcgtcagccagttcggcgatttgtgtctgacttagtccagaaatacgttcgatatctttccactcggaattgagaacgtcacggcgtagctcgtcaaagccgacggtatgcgtttgaataaactcgtcatcaagcaaactaggccgacctgcggcgcttgcagcatcatcgcgctcaattaacaggcgcatcatccccttgagcaacgccatatcgccaccaatgcgcacgttatagtaggcactggccaactgagtctcagagttcgtcagcatttcaaacgggttttgcggtgcggtaaatcgctccaggccacgttcctgtagaggattgatggcgatcattttcgctccccgtttcactaaagcgcgcaagctagtcagcatgcgagggtggtttgtaccagggttatgcccaatgcaaatgactaaatcgcacttctcaaagtcttccagcaacacggtccctttacctacaccgatactcgctgccaaacccacgcttgtcggttcatggcacatgttggagcagtcgggaaagttattgctcccgtattcacgggcaaaaagctgataaagaaaggcagcttcattggaagtgcggccgctagtatagaattcaacctgattgggatcactatagctttgaaggcgtgcgccaatttcgtcgaaagcttgttgccagcttaatggcttgtaacagtcgctgacggcatcatatttcaaaggctgagtgagtcgccccgcagcctcaagctcgtggtctccccaggtaagtaaactttgaaccgtattctcagcaaagaaagaggcgtttacctgcttatccgtgacttcccaggcgattgcttttgcgccgttttcacaaatgtcgaaactcgcactgtgcttaggatctggccatgcacaacccggacagtcaaagccctctggcttattcatgtcaaacatggcaataacatcctggcgtatatccatctgcttacgtactgcattcgctacggatttaacagcaccccaaccacctgcagcaccctggtaggattcaatttttttcttcatctacttatcctgtgtggaaatgaattattaggatttgtaatagcgatgatgcacagtacatacaaagggattatcgccaacatggatatataagagtaggggactactctctttctatttttaatctattatcgttaaacaatagattaaatacgataagttaagcatcatctctcatagtgtttaaattaacatatttttcaatataaaaaataagactctggcttcaattgtgcgcggattttcttacaggtgtaggctaatagccttcacaaaataattatccgcgcaattttcgtgaatggagcgcatagactaaggtcaaaatcacaattattcatagataaaagtgacaccaatgacactctggacggttccggcactaaccttgtttcctgtttgtccataggttgcgcttaaacccagaggtactttgcttttatttactgtccccagggagacattttctcccgtagccagtatttttccattacgcattagagtgacacccactccgcttgcttttgttgcatcaggtgctgtgttagcaaacacttgtcggctactgtcagtggtggcaccgctaagataaaaactgagcttttgttcgctactgcaatatacgccaaggggtatttctgcgcttccaggaaagtccgggagatccacggtgacatttcgactatcaacggtgcagccgcctgttggcataacaacattgttattactaataatattccacgtaaaattacgcggatttccgcttcctaatgttgcaattttatacatatgaatacgggcaatgacttcccccgcttttatgacaactccaccggccgccccaactggggtaatatagagttttaacggtaatggcatcggtgtcttatcaccaatatccaatacgttggtatttgtcgtcaacgggaaggggtaggtcacattattccagtacaggcttcctttataactctgtagggagcctgcgaaagcactgccttgtaccaggtttatatgatcagtgtcgtaccagccgccgtaatcattccagcaacttatatgctgagacaagtctacaaccagattctggcccggctgtattacagggtcgagattaacataaacagaggttgtacctgctccaatactactcccgccatcgacattacaactgaaggcaaaaactttgcctgccattaatagaagataaataccgaacaggacctttatactgattgttttacccatgatatatcctaaggttaaaaattgatttaaaaagaaggctaagaaaatcgaatcgacgttattgccaggtgtagatcacattgattagcgcctcgatcgttccctggcttgcgtttccattcaccgtgatagctcttgccttaagtggaaactgtgcattacgagtgatctcatcaacaataaccgttttgctatcgccattttttaacgcagcatcctggtcatccctcagctctatctgaatattttcggcagtaccttcatttttgtaataacccgtattgtcagtactacctgtcacgattgccgtcactgcacttgtttcaaccggacaatcggttaaactcaaagtaatattgtgccagccagatgcagaaccaggttgttgcagattgcgcgtataaagatccccgagattaacgttagcttctttggtttgaatagtgcagggtttagcgactacccgaccattaacagtgatagtgacatcggcggcctggagagttgctgtgaataacgcgcaaaacgtagctaacaggaacctcttgtgaagtcttttcatatctgactctgattattgaaattcaagggtaaaggttgcgctagccctcaccagtcccggattgacggacttctgagtactcttcagacgagcggagtaaggcaaaatattgttctgttctggtaccagtgggatccactgcatcccggcatgaagatcattcagtttcaccggacgcatatttgcgtccaatatttctatacccaaaccggaggccgtattgcttccttcatccagtttcaacaaagtattattttctgcatcctcaataccgttaaatgcaacccgaacccccgttgtccctttgctgcattcacttaacgtaatctgaaaagggacggctggacttgtgctaccggtcgttggaaattgtctggcactgtttttttggagatctacggtaaaattaaggctatcgctactgactgtgcagccataatcgaggacgcgcccgctaattttaataacgctatctgcggataaagcagaataggtggttaaccccagacataaaccgaggaaaataatgttattgtatttcataatctattgttccttagcgacagattgctgtctgctggttcagtaaggtaccaggagaaacttcaggaagcttgtactcgacaatacagttactgtttttatctttgccccaactaacctgtaattgcccactctgtggaagtccagtcagataaacctgaccattttccgcgacaatgctgccatttttattctctccgtgtgtgacaattgcaccgaatggaacgctcttattaccgtacttcaacgtcattaatactttcccgccgatttgtgcattaaatgttgctctggcaatagcaccgtgagttgggatgacagtgaccacggtttcatccagttcaacattatctgcaagggaattcgcgttaagagcaacacggttttctctatattctgtcgcaaatggtaatatggcatagccacgccagtcggtatgaattccggtctggttctctattttgacattatcagcaccaggagccttaaccagaaccattgtgtcgcccagcggctgtccaaaggtgatgccatcagcatgagcaataatcccaccactcattccgtaataaatctggctgctgtcaccactccgactgtaaccgacattagtattaccataagctccacgataattaagagaactgtaaccactggtgccagagcttgtattacctccgtgggtgttaccgacctgaacgctataattcaggttattatccggcagcagagtgccataaaccccgcttagattggtcatgccgcctttcaaatcgttactcatactgtaactggcgttactattacgaaatgcgctctgactgtctgtacgcatccaatgactgaagggaacattaagcgtaaaagcgagtaaatgatcccgatcgttttgccatatattattggaatagctgtaattcaggctagtcgtaatatcaccaaacggcacatttaatccaaaacttatttgctggtcgctgcgactcgtgttccagtaactttggcgactggcactgaaaaatgtcgtaccgtaatttccaagctgctgagagatgcttatttgttcctgaccacgcttactgtagaacagattaaaataatcaataaattgtgtctgctcattggtgtctccggtaggaggcttgacggtgtaaccactcattcgactgtaggcactgtcggataagttataaaaaccttgcgtagaatagcgatatcctgcgacctggatattggttccacaacaagtttattgctgcacttgttgaagagagtatttgcaaaaacattttatgtcgctaaataacatgacgatttcattatgcatgttatttataaaccgtgactaaacagaatattattgcgaacaagggaagtgtcaggaaaggtcaagagctaccaatggttaatatggctataaatcattagctatggttaatgtttgcttgctgaaactaacaccgaattgctctaaacagataagtgcagggtttattaaagctgtccgacagactttcttaacctggtaatatctctcttgggtgactctccaaacatccgcgaatattcccgacactaatgggatagctttcgtaaccgacagcataggctgctgtggtgacatcgtaatgttcattcagcatctgtcgcctgacttcattgagacgtagccatttctgataccggagtggactcattcccgcttgatccgtccttaaataagtaacagcaccctctggtgttttcgtatgcagtgtctatgcgacagacactgcgctcttagcatggggcagggaataaccaggctatttctccatgcacaggccaattatgaaagaggagaggcttaagttcttgaaccctgaacgaataacgactaccagaaaagcacttcgcatcactcagacatgatttaacataatatacattatgcgcaccaatataaaccaaggaagaatccagtcgttggcggtcatgattgtcatgctcattaacaatgaccaaaccccatatctcacttactaccgtattctcggcttaaccgtccatgcaacctcaacacattgctttcaactgccgtcaccacgttctccggaaaatctgtcggtaaactagtcttcacgttatccagtgctgctggaatcattctggcaaagtcactcaggatttcatgcatctgcacttccgggaatctcagcacctttgctgtcgccaaaaaatgtcgcggataaattttatcgattgccgtttttttgcctttggatgcgttaagccccattgccagtttgagatcgctgatgtgtattcccgtaccgccaaggaccggaaatgcactaatgatgtcgtaaaatggcgtgagtcgataactgccgccagcctgaataaatacggagaagttttttgcatgaccgtccgttgcgccaatcaaccactggaagacctggaatttcataaaatcatagcgatctttcagcgcctcgctggaccccatcaaaaaagccatgatccgcgcgatgcctgggcctccatcactttcatatttcacgctactaggtaaaccgaatgtctgacacatatcctcctgtggcaagcgaagtaaaaccgttcgctcagcattccaacgcctgtcaaaacgttcgaccgctaacgcgcgcacatttcccgctttaatgatttctgcgtccggaacattcaacccaagttctttcgccagcagcagacagtaatactcattatcaacgctttggctgagatcgagcgtcgcattgggctgcctgatttcgccaatcggtaatttaatgatgtgcgtcgtcggcgttattcctttcggaatgcaccagtcattgcctattctgagcagtgctgtcttctcctgtgcgccagcaacgctgatgcgaaagtcattttcttctctaatcatgcctagcgggatatctgctttataagccgttaatacttcttcaagtctggcttcagtaagcttttcccatgccattatcggatgcgttacggtttcgtcttcgggtattaacgtcacggcaccaacgctgtctcgccctatttcactcaataaatcaaacggttgtctggatttggcatgataacgtttaacgatccggtcacgtacaatcgggctatcgggtaacaggttatcgaagaagttaaatacggcatcagaggtgatattccccctctgcaatggcaggctaagactcaacggtctggcataacggcttgctaaccactccggtgcatacttaaaggtgtgcgcgccgttggctaacttcgttaactcgcctacccgctggttgttcatccaagtgacaagtttaggcattaccactccagattttgctgttctgtactttctgggctggcatttttcgcgtcgcatagcgtcatactgagttcaaggctctgtaaaatcttaaaaaatgtcgtgagcgtggtattgtcagggttgttttcgaaattggaaatcgtcgcctgcttaataccaatttttttcgccagctcgctctgcgtccagccattttgctggcgaaccagtttcattgcattcgccaattgcgttgggctatagatcttctgaaagctcatcatgtcatacgtccacagcaagtttatccgcttaaggggatattataagttttatcctttagtgaggataagtcaatctggaaacacatcttatccgctctacgggataaacgctgcgatatccgcgatcgcggataaaaaggaggatttaaataaggcgttgatgcgccgtttgaagtcggcaatattaagccgcatgccatctcgacatgcggcttatacggtttaccagctatatttcactcccagcatgccctgagtatcgctatagcctttatcacctagttgcacaccgacattcccccacaggctaaggttgttatttactttcgcctcaaccccggtacgtacttcaccgagattacgcgcaccttcacggcctacggtttgaccattcatcttcacggcgtagactttgctattgttgatccagttcgcttcaatgtaaggctggaactcacgctgtttaccatcgtcacgctggtgatggctgttcaggtaggttttcaccccaagtcgcgtttgcacatttccgtcgccttccgtttcaatgcgcgttccgtctttccgggtatggtcggaatctttcacacccatccaggtgatttgcgcctgtggctggacgtaccaggtattcagcgtcccttcgctgccgctaaatgttcccgcttcaaaggtatacccaccctcaacagaggccgtcacaccgcgagaatcatagtcgtcagcagaacggttatcggaactgacgctgttatcaaaccagttatacagcgcccagctgtcaacataagcgccggtcttattcgcatcgttctgataccaggtcgcgtacagcccagcgctgtaaccgctgatgcgcccatcgcttttataacccacacgattactctgagtattactgtgctgattggcgtagcctgccatcacgccaagatgccagcgatcctgcgcgttgctactccactgcgccaaatcgccgcctagctgcaatacatagcggttagcctgagtatttagctgaccgtcaccggccctactacgttcgtgccctccgacatgacgcatccacatactgcttgcgctcccctgagaatgcagactatctgtatactgcggctcacccagacggtcgtgtaaacgatggctaaacaggctgttggctgcggcaatgttgctgatatagcttccggcctccgggcgataaacacttgggccttccggatccacaacagggggattattgatgggatcgggtgtatccgctggcgttacgccgtcccatttactggtcagataccagtttttctcgtcattccccttccctttagccagcgtgtagacgtaagccccagcttcgacagttccggtggtcagcgcgaagttacctgcagaattaccgccaacctcaatgagttcaataccgttgaccgtttgtgcaccgacgccgccaatgttatcaacccgaacgcgagtgttcccttgggtatcgcctttcacgttcatcttatcggtggggctattatcgccgcccagcgtcgcgttgaacgtcatcaggccattgtttccggtatagttgccgttaacggtcagtacattccccggtttccccccttcgctattcatttgaaccgtgccgccattctccaggttgccgccgatagtggttttagcgacacgcagtgccccccccaggcataacgttcatatcacctgcagtggtgacatttccgctcatcacaccgctgttatggatattaatgtgttgacttgccatattaatggcagagtcggaaccgaaagcaatttccccccccacgatatccgtcgtaccctgatatgccgcggaatcgttgttaagagtcaggatcccggtacccagttttgtcacatcaccgctaccgctgatactgtgcgtcatcgcccagctacgctcagtggagatggtgagcaggccattattgataacggaagcatcacccaggtttttctgctcgttgacgctgagcgcgctgcctgtatcaatgttgaattgccccacaaagcggctattatcgccatccaactctacatctgtcctggcggttgcgctcacgatacccttcccgcttatgctattacgcagttcgccagtcacgttttttagcgttaacagaccgtcattggcaatatttcctctgcctaacccctgagtattatcgaggctgacttccgcatttgggctaatgctggttaacgcattgtagcgtgcattaagcccctcgatagccagcgttccccctgtaacattcaggtttccgccacctgtcagttcaccctgactgatcccacctttatttaccgtcagcgccccctctttgaacaaaacagtgctacccatctgcccggtgaatgtctctaccgtctgcgtgcttccattaagatcgacgatggccgcgttgctgatgttcagttcccgggtgttgccaagtgcaccatccgcatcggtacgtaatgtccccatctgaacgtaggttgccccctgatagtcgttctgaccgttggaaaggctaacctgtcgcaccgtattgattgccagatccccttcaccaccgatttttgcgctcatatcggccgttgcgccataggctccgccatgttcggctaacgtcagcttttgcccaccatggatgttcagcgctttcagcccatagttaacgtacaaaccattacctggtgcggtcgtgaggcggaatccataatcaccctcggcgaccaccgttccgttttgcgcaatgtgtaacgttttgtccgcttccacctcgtcgccctgtaaatcacgtaacgttaaactgccaccgctcccaataaccgtttgcgccttcaccagttgaacgccgacatggctatcgtcgtgttccagcaaattgagcgtcgtcagagggttattcgccatgggatcattccacggtttaggcacgtcgataagcacgtcgcccgtcccgtttacctgatagttacggcctttccaggtgtagtcacccgcgccgacaaccagcgtatcgacgctgatatatccctccgcgagcgtcgcagcaggaatatccgtatcgaaaatgatggtacctccattcatggccagtccaccaatggattgctctccaacttttacgcttgtggtattttcactgtcagactgcaacatcgcgtgagtaagcgcagcggtgttgtcgcgttccagagtgaaggtactgtctttcagttgggcaacaccggcgaattcagtccctgttgcatgggtaaagccaaacatcttgtcggaggaactcagctgcactcgcatcaagccatcgcctttgagcgcattggtcagcgtgtaatctcctgcactgttcgtacttgcgagaatgtcgagcgtaccggggtttgcaatggttacttcactgctccccatgcccgttaccccatctgccgtatgagacgcaatggtcaggaggccgtcattgaccagcgttttaccgctataagtattccctgcattgaacaccgtatggcctgcatcatggatcacttttccgtctttatcgtcacctgtaatcagcatatcgacctggtagccggcatcactgttattggtatgattaaagacaaaaacgccttcgccaagaccaaactccactttcgtcgcattggtgataaatccggcatctgccgccgcctcaccgtgagcagcaccaatgtttagcgttcctacagcaggctcaaaaacacctaagtaaacttctccaccttcgacattcagcgtaccgttattcgtcagggttaacgtacccgtaccagatgtccctacgtacatattgaatgtttcaagaagagagttctgcccatccaccctcacgtcgcccttacttttgtcattgagagctatctgtgtatcacgcgctttaactatacctccggtggtaatattcagttcacccgtgcctaatacaccgacctgtagcaattgtgcgttagtagaacttgtctttaaattccagagactgtccgtactaatattaactatccccttaccggaggcatttcctccgataaatccatagcccgtactattaagggtggcaccattactgacatttacgataccgctaccaaaattaccgacattgatacccacagtatcgaagctacttgtcgcatccatcaggttcagtgtgccgataccgcttgctttatcgcccaaaaaagtaatattttggcttacgaacttaccgccatcgctaatattgaggtttccgacgcccgcaacaccaatggtggtatagacattcttattgacctcccacattccccccgtggtgatgctgacattcccgacgccggtttctccataaccgagactacttcctccgttgctgacaacaagcccctgattactgatattcatttcgccgtggccgtcataaccaagattagttccgagattagtgataacggagttcttatccttaacagtaatgttgcctgtgcctgtttctttcatccccgcagtgataattccgctatctactttgccttcactgctgacattaagttcaccgtcgccagcatcaccgatatagatatagcggaaagcttcgcccgttccgaggaaattccaatgccctttatcggtcacgttgacgacaccgtgggaaccgtcctgaacgcccaccaaactatattctttgttattaatcagtccattattggaaatattgactgtgccattaccgaaatatccattatagagtctgcgtaccgtgatgacagagtcttgatcctgcacattcagggttccgataccggtggcattgccaccgataatcgtattttcagccgtaaccaaccccccctcgcgaatagtcgcctccccagttccttgattaccaatttgaaattcaatactggaatcattattttttattagccactcgccacccttttcaacgacaacctggccattactgcccgcctgatagcctaaaatggcgacgatactactcgtgacgtaacccttatccgtaatatttaaactacctgtgccatagctacctatttcgaataattcggtcgtcagaacagagtcctctccctcaacattgaccgtcccgacgcctcctgtgctagaacctaatcttaaatagcctccatcgacgtgacccttctgtttaatattcagcgtccccgttccggattgacccacatttaaaggccttgcattatttccgctatcatacaatcgccaggtgccacccaaaacattaacggtgccctcactgtcctcattagcgccaatgacgctggtagtaatagtggttaaggaggcattaccgccagccaaaatattaagcactccagtgccataccagccaaccaggtaggcatcataagcaacatcagtatcaatattggtaatctgatcattatcaacttccagacttgcaccagacgcactaccgcttagtgccagcaaaacacccagcgtcaatctactgaatttcgttgtcagtccagaggatttacgcaaattaaccgtgcttgttttacctgccctgcgagttaattcgctgcaggcctgaaatacctgtagagtgcaattccatatcacgcgatagattctattcatataaacgctccatatacaaacaatacagccacgaaagagatgagtcgtcagacattaaaaatgaaacttattaaattgtcagaggtctgtattgagtgttagttggaggtgggaaggtgtcaatttggctaatttgctaatgctttcgaattgatagattaaaaattgcatagttcttattttatttaaatatgaactatgagttattgttgcttaataagaaaactgtttctttcaataggaaaattatcatcatcatatttaacaaagaatagcactaattgctaaaaatcgaagtttattaaaccccttttgcatccattagtgtctttaggaatattcgctataaaataagggttgtgcttaatgctttaagaaaaatagcaattttcccttgaatatcgtactggtgatggaacgatgaatctgcaagctggcttttaacaagccagctctaaaagaagggaaataagaataactatactcaaaaactaacagccacggtcatcatgatgtggctgtcaatgaaattataacccaggcgctttccataagctcgtcgtcagtccatgatcaaccagccccagctgatcctgataaactgcctgccacttatcgcgactatcctgataaagttcatgcttttccgggtctggtgtgtgcgtccgttcccagcgaaccaggcgttctccggtttctgccatactactaaaaattccggcaccgacgccagctgcaatggcacatcctaatgcagtggcttctttgaccaccggaatattgacgggtaatccgctgacatcagcgagaatttgactccataatttccctttactacctccgcctgcaaagactaagctactaggatgaatattgctgaaatcagcaatttgctgcaagttacacgcacttacaatcgccgcattttcttccagcgcacggaacaatgtcgctttgttacatttatccgggtcaatggacaagttaataaaggaaggcgcagcgtgataccaggttttaaagcgcattctgtcggagaagatcggcattacgccccagctcccaggcggcacccgactggccatctcttccagcagcgtataggtgtcgatgcctaaacgttcggcaatcagtttttcttcggcacagaaagcatcgcggaaccagcgcatggtgagtccggtaaaaaagcttatagattcagcttgtaccatgccaggaataacatgaggattaacgcgcacgttcatttctgggtctgtcaccggcgcggctaaatttacaacttgctgccagaatgtgccgccaagaaccgcggtttgtgccggacgcacaacgcctaacccaaggcaaccaagctgcacgtcgcctcctccaacgaccaccggagtgcccgccttcagaccgcagagttccgccgcttgactacttaccacgcccagcaatgtgccggtttctttgacaggagaaagaatatcggcacgtaggccagccatatccagcaatgcaggtttccagtcacgggtggttagatcaagaagtcccgtggtgccagcgttagagggatccaccgccagttcgccgctgagcatataggccagccagtcgctgatcatggtgatggtacttgcctgacggtaaatatcggaacgatggtgcgccagccaaagtaatctggggatggcacttaaagccagtgtttgtccggtcgcgcgataaacttcgttttcaaaggtattgttgtgcagttctttaagttcgctaacttcgcgtgccgctctggcatccacattggcgcaggcccagatcggggctccttcattattatataaaacaatgccttcacgcatgctacatgcgctaacggcagcgatatactccggggctatgccggcgttgtgcagcgcctggcgcatacactcacacgccagttgccagtttttgttgagatcaaattccatagaaccaggaacgtccggtactgccagatgccgccactccgcctgtcccactgctatttgattgccttccaggtcgaatatcacagcccgaatacttccggtgcctgcatccagcgccatcaggtagtacttactttcactaagggtaaagagtcgagccattagattatcctcggcttatgcgttctgtctgttcctctatacgttctccatcattcccggtaataaggtcatgcaaatttaactacgtaaaatcgccgctgctgtgtcctgatcggtaaccagtgcgttgatataaccgcctttcattgcagcggcaattgcttcggctttattttctccccctgccacgccaacccggacgggtatggtcttcagcgcgcttaaaggtaagccaatcagttcgttatgtattttgatattcgtgacaacgtcaccttttgcatcaaaaaagtagcctaaaatgtcgccaaccgccccttttcggccaatcattaactgttcgccctggctgatataaccggagcgaatgattgtcgcatcgtcctgttgactcacagcaccaatgccgacaatcgccacatccgctgcttgcgcggctaacagaacatctttgacgcaattttcattttttagcgtacgggcaatgtcagcggaggatgcccgcaacggagccggaataatattcacactgcacgccgcgttaagctgcccgattcccgtcatataagaaccgacgccaccggagagcgtgaccaggcgaatttgctgactgctaataaaaccacttaagcgttgcagcgtattcatggttgcctcgccaaaaccaatcgccagcatctgttgtggttgaagtaaactcatcaacatatgcgccgcgcctatccccagtcgcccaccgacatcagcatccgcaagcccagggatcacccggacatgttgcaggctaaactgacgacgtaattgagtttcatattccagacagccttcaaagcgagaattaatctgtacgcgaataatgccggactgatgccctttctccagcaatcggctcactttcaaacgtgtcaggccgagacgatcgctgatctcgctctgggtcagcccgtcgtgatagtaaaaccacgcgatccgcgcgacctgttcttcttcacacattccctgttcactaattgcgctatcgttgattgtcataattcattcttcactttgaacatatttaaatctttaatgcaattgttcagttcttgctcatttatatctgtgatggcaaccacagtttgactctacgagcatgaacaaacgcaaccgtgaaaatcaaaatagcataaattgtgatctattcgtcggaaatatgtgcaatgtccacctaaggttatgaacaaattaaaagcagaaatacatttgttcaaaactcacctgcaaaactgaacgggggaaatatgcaaacgagtgatacccgcgcgttaccgctactttgcgcccgcagcgtttataaacagtatagtggggtcaatgtcctgaaaggcatcgattttacgttgcatcagggggaggtccacgccctgctcggcggcaatggtgccggtaaaagcacgttaatgaagattattgccggtattacccctgctgatagcggtacgctggagattgagggcaacaactacgtcagattaacgccagttcatgctcatcagctgggtatttatctcgttccccaggaaccgctgcttttcccaagcctgagcataaaagaaaacatcctgtttgggctggcaaaaaaacagctctccatgcagaaaatgaagaacttgctggcggcgctgggctgccagtttgatctgcatagtctggcaggaagcctggatgtcgccgatcgccaaatggtggaaatcctccgcgggctgatgcgcgacagccggattctgatcctcgatgaacctaccgccagccttacccctgcggaaaccgaacgcttgtttagtcgcttgcaagagctgcttgctactggcgtgggtattgtttttatcagccataagctgccggaaattcgccagattgccgatcgaattagcgtgatgcgcgacggaaccatcgccttaagcggcaaaaccagcgaactgtctaccgacgacattattcaggccatcaccccagcggtacgggaaaaaagcctctctgccagccaaaaattatggctggagttacctggtaaccgcccacaacatgccgccggaacgccggtgctgacactggaaaatctgaccggcgaaggtttcaggaatgtcagcctgacgctcaatgccggagaaattctgggcctggctgggctggtgggggccggacgcacagaactggccgagacgctctatggtctgcgtactttgcgtggcggacgcattatgctgaatggtaaagagatcaataaattatccactggagaacgtttactgcgcggtctggtttatctgccggaagatcgccagagttccggactgaatctcgatgctagcctggcctggaacgtctgcgcccttactcataaccttcgtggattctgggcgaaaaccgcgaaagataatgccaccctggaacgttatcgtcgggcgctgaatattaaattcaaccaaccggaacaagctgcacggacattatccggtggcaaccagcaaaaaatcctcattgccaaatgcttggaagctagcccgcaagtattgattgtcgatgagccgacgcgcggcgtggatgtcagcgcccgtaatgatatctaccagctgttgcgcagcatcgccgcacaaaatgtggctgtgctgcttatctcctccgacctggaagagatcgaactgatggcagatcgtgtgtatgtgatgcatcagggcgaaattacccactctgcactgaccgagcgcgatattaatgtcgagactattatgcgcgttgccttcggcgatagtcagcgtcaggaggcgagttgctgagctaaagtcagcgtcaggaggcgtcatgctgaagtttattcagaacaaccgtgaaatcacggcactgctggcggtggtgctgctgtttgtattacccggttttctcgaccgccagtatttaagtgtgcaaacgctgaccatggtttatagcagcgcgcaaatcctgatcctgctggcaatgggcgcgacgctggtaatgcttacgcgcaatattgatgttagtgtgggtagcattaccggaatgtgcgcggtgctgttggggatgttactgaacgcaggatatagtctacctgttgcttgtgtcgcgactttactgcttggtttgctcgcgggatttttcaacggtgtcctggtcgcgtggctaaagatccctgccattgttgccacccttggcacgttagggttgtacagaggcatcatgttgctgtggactggcggcaaatggattgaagggttacccgccgaactgaaacagctctccgccccgctgctgcttggcgttagtgcaattggttggttgacgataattctggtggcatttatggcctggctgctggcaaagacggcgtttggacgcagtttttatgccacgggcgataatttacagggcgctcgtcaactgggcgttcgtactgaagccattcgcattgtggcatttagcttgaacggctgcatggcggcactggcgggaattgtgtttgctagccagattggttttatccccaaccagaccggtaccgggctggagatgaaagcaattgcagcctgcgtgctgggcggcattagtttgctcggtggttccggtgcgatcattggtgcggtactcggcgcatggttcctgacgcagatcgatagcgtactggtgctgttgcgcattccggcatggtggaatgattttatcgcgggtctggttctgctggcggtgctggtgtttgatggacgcctgcgttgtgcgctggaacgtaatctacggcggcaaaaatatgcccgctttatgacgccaccgccatccgttaaacccgctagcagtggtaaaaaacgggaggccgcataatgcgtattcgctacggttgggaactggctcttgccgcactgctcgttattgagattgtcgcatttggtgcaattaacccgcgaatgttagatctcaatatgttgctgttcagcaccagtgactttatctgcattggcattgtcgccctaccgctaacgatggtgattgtcagtggcgggatcgatattagctttggtagcaccatcggcctctgcgccattgcattgggcgtactgtttcaaagtggtgtgccgatgccgctggcgatactcctgaccttactgctcggcgcattgtgcgggctgatcaacgccggattaattatctataccaaagttaacccgctggtgattacgcttggcacgctgtatctgtttgccggaagcgctctgctgctttccggtatggccggagcgacggggtacgaaggtattggtggattcccgatggcgtttacagatttcgctaacctggatgtgctgggactccccgttccgctgattatcttcctgatatgtctcctcgttttctggctctggctgcataaaacccatgccggacgtaatgtgtttttgattgggcaaagcccgcgcgtggcgctttatagcgcgattccagttaaccgtaccttatgtgcgctctatgccatgacggggctggcgtctgcggtcgccgctgtgctgctggtaagctattttggtagtgcacgttccgatctcggtgcgagctttctgatgcccgccatcaccgccgtggtgcttggcggggccaatatttatggtggttccggttccattatcggcaccgccattgcggttttattagtgggatatttgcaacaaggtttgcaaatggcaggagtgccaaatcaggtgtccagcgccctttccggtgcgctacttatcgtcgttgtcgtaggtcgttccgttagcctgcatcgccagcaaattaaagagtggctggcgcgtcgggccaataacccattgccataaaggatatcttcatgacacttcatcgctttaagaaaatcgccttacttagcgctcttggcattgccgcaatctctatgaatgtgcaggccgcagagcgtattgcatttattcccaaactggttggcgtgggattttttaccagcggtggcaacggcgcacaacaagcgggtaaagagctgggcgttgatgtgacctacgacgggccgacagaacccagtgtttctggtcaggtacagttgattaataacttcgtcaatcaaggttataacgccattatcgtttctgcggttagccctgatggcttgtgtccggcactgaaacgcgccatgcaacgtggtgtgagagtgctgacctgggactctgatactaaaccggagtgccgctcttactacattaatcagggaacgcccgcccagttaggaggtatgttggtggatatggcggcgcgtcaggtgaataaagacaaagccaaagtcgcgtttttctacagtagccccaccgttacggaccaaaaccagtgggtgaaagaagcgaaagcgaaaatcgccaaagagcatccaggctgggaaattgtcactacgcagtttggctataacgatgccactaaaagcttacaaaccgcagaaggaatattaaaagcgtatagcgatctcgacgccattatcgcccccgatgccaacgccctgcccgctgccgcacaagccgcagaaaacttgaaaaatgacaaagtagcgattgtcggattcagtacgccaaatgtgatgcgcccgtatgtagagcgcggcacggtgaaagaatttggcctgtgggatgtggttcagcaaggcaaaattagtgtgtatgtcgcggatgcattattgaaaaaaggaagtatgaaaacgggcgacaagctggatatcaagggcgtaggtcaggttgaagtcagcccaaacagcgttcagggctatgactacgaagcggatggtaatggcatcgtactgttaccggagcgcgtgatattcaacaaagagaatatcggcaaatacgatttctgatgtgcattacttaaccggagtaagttatggcagatttagacgatattaaagatggtaaagattttcgtaccgatcaaccgcaaaaaaatatcccttttaccctgaaaggttgcggtgcgctggattggggaatgcagagtcgcttaagccggatatttaatccgaaaacgggtaaaaccgtgatgctggcttttgaccatggttattttcagggaccgactaccggacttgaacgcattgatataaatatcgccccgctgtttgaacatgccgatgtattaatgtgtacgcgcggcattttgcgcagcgtagttccccctgcgaccaataggccggtggtactgcgggcgagtggtgcgaactctattctggcggaattaagtaatgaagccgtggcgttaagcatggatgacgccgtgcgcctgaacagttgcgcggtggcggcgcaggtttatatcggcagcgaatatgaacatcagagcatcaaaaatattattcagctggttgatgccggaatgaaagtgggaatgccgaccatggccgtgactggcgtgggcaaagatatggtgcgcgatcagcgttatttcagcctcgcgactcgaatcgccgctgaaatgggggcgcaaattatcaaaacctattatgtcgaaaaaggttttgaacggattgttgccggatgtccggtacccattgttattgctggcggtaaaaaattaccggagcgcgaggcgctggaaatgtgctggcaggctatcgatcagggcgcttctggtgtggatatggggcgtaatattttccagtctgaccatccggtggcgatgatgaaagccgtacaggcggtggttcaccataacgaaacggctgatcgggcatatgaactctatctgagtgaaaaacagtaactgcggatctaaggagaagaattatgcacgtcacactggttgaaattaacgttcatgaagacaaggttgacgagtttatcgaagtttttcgccagaaccacctgggctctgtacaggaagaaggcaatttgcgcttcgatgtcttacaggacccggaagtgaatagccgcttttatatctacgaagcctataaagatgaagacgcagtggcgttccataaaaccacgccccactacaaaacctgtgtcgcgaaactggaatctttaatgaccgggccgcgtaaaaaacgtctgttcaatggtttgatgccgtgaggcgaatttatcaattttatctacaattggggtaacgcgctgacgggagtaaaaaaatgtctgactggaacccctctttatatctacacttttccgctgaacgaagccgtccggcggtggagctgcttgccagagtgccgctggaaaatgtcgaatatgttgccgatcttggctgtggcccaggtaacagcaccgcccttctacaacaacgttggcctgcggccaggataacaggcatcgacagctctccggcgatgattgctgaagcgcgcagtgctttgccagactgccagttcgtggaagcagacatccgcaactggcaaccggtacaggcactcgatctgatttttgctaatgccagtctgcaatggctgcccgaccactacgaattgtttcctcatctggtttctttacttaatccgcagggcgtgctggcagtacagatgccagataactggctggagccgacccatgtgctcatgcgcgaagttgcctgggaacaaaactacccggatcgcgggcgtgagccgttggctggcgttcatgcttactacgatattttgagcgaagccggatgtgaggtcgatatctggcgaaccacctactatcaccagatgccgagtcaccaggcgattatcgattgggtgactgccactggattacgtccgtggttacaggatctgaccgagagcgaacagcagctttttcttaagcgctaccatcagatgctggaagagcagtatccactgcaagagaacggacagatactgctggcatttccgcgtctgtttattgttgcccggcgtatggagtaaatatcacgtcagctggtaatgacgatcgggaagaatttttgctggaatttcggcttcatcgttcatctgtaacaggtcaatttcaatagcgttgcagatggcatccagtggtaaatcattgttttcagtaccgaacggatcttccagttcttccgccagacaatccaggctaataaaagtgtaggaaatcagcacagagataaaaggcgtcatgtaatgcaggtccacgaccagcgcgaacggcagcatgatacaaaacagataaacggtacgatgcaaaatcagggtgtaggcaaagggaattggcgtataggcaatgcgctcgcatcctgccaggaccgcactaatatcattaagccgatcgttgaggctaataaacaggatatcactaagctgtccattgcggcgctgaaccgccaaccattctcccattattaacaagatacggttagctggagagttgctagccagtacacgctgaagatcttcagtcttgagataatgagccagcacttccgcctgtggctgtttgcgtaatgtcatgcgtaaacagtgggcgaaagcgatttgcagccgggcaaactcccttacacttgcgctatccggcaatgtcgtttttacctcgcgcagtaagctccgactggcaatcatcaactgcccccaaagttttcgcgcttcaacgtaacgggcgtacccggcattattacgaaaaccaagaaaaatggcgatggcgacaccgagaatgctgaacggtgcgagggtgaatttgatgcccagatgcgtgtaccagggcagcatgaaaataacagcgatagaaaagagaaaattgagtagtaagcggctggatatcttggataatacactgccgtgccagacaaaaatacggcgcagccagtgttgttgtggacgaacaatcatggttatcttcaggcgtggaaaagtcgccctattaaacgtgattacgatcacattctcaagacgctacttacaaattacctacaagcttacaacattagcaggcgctgcatgtggcacctgttaatgataaaggcatataggatgttgtaactaatatggtgaaataagaaacccggtcgaaaccgggttcagaagtaacggtgttattagcacaacggacgtacagcttcgcgcatccctttttcgagaatcgcatccaggtcattagcaacctgctcgaccagaccaggcacttgcgtcaggtcctgctcccagtggtctttttctgccaaaacaatcgctaccagttcctgggtgccgataacacggtcacgatgctggctccagagttgctgataacgttccagccagtgtgcatcgtcctgtaccggatatgtttcgccgttacgctcaccacgatagaacgcaatcaatgccgctaatgcgaaagtaaggcgcgccggaagtgtgccgtttgccttctgccctgccagcagctgtggcaggatgcgggtgcggaacttggtcataccgttgagcgcgatagacagcagctgatgcttaatgtacgggttacggaaacgcccggtgactgcactggcgaaagattccagttcatcacgaggcaaatccagtaccggaataatttcttcgtagatagctttttcaacgaatgcgcaaatttcagcatcgttcatcgcttcacctacggtatccagccctgcctggaacgccaccggcaccagcgcggtgtgcgcaccgttgaggattgccactttgcgttctttgtacggtttaatatcgtcaacaatcagcacgttgagcggatatttgtccagacgcagttcagtcgctaaggatttcggtccctgaatcacaaacaggtaaaagtgttcagcggtgtcgagaaaaccatcgtgataacccagttcttcttccagtttagccacttcatcgcgcggataaccggtaacgatacggtccaccagcgtagaacagaagctgttagcctgatccagccattgaataaatgcttctggcagtgcccactcttgcgcatagcgcagcaccagttcacgcaacgcgtcgccattgtagtcaatcaactcacacggaatgatgatccaacctttatccagcgcaccgttgaaatggctaaagcgttcgaacagcagacgggtcagttttgccggatagcttaccgctggcgcgtcatcgaatttatcgcccgcatggtagctgatacccgcttcggtggtgttagagaaaacaaagcgcatttccgggttgtgcgccagtttcaggaattcatcgtattcactgtagacgctgatttcacgattaacgctgcgaatcagacgcgcgtcgctgaccgcttcccccttctcattcaggccacggataatggtggtgtacagaccatcctgcgtgctcagactcggcgggaaactagtttcaatcggacgaacaacgaccacgccagaattcagatcggtgtgctcattcaggagatcgatttgccagtcaacaaaggcgcgcaggaagttaccttcaccaaactgaatgatacgttctggatactgtgcaccgggaaaatcgcgacgatttagtgttttcacaatgggttcccttctgattagtcatacaacctgtttgaattggtacgacaggttagcaaactttaatacgccgaacccctgttttgatcaactcctgatgattaatgagcagttttatgagaaaagtgtggcgcggatcatggtttaatcgaggaaaaacgccttttcctggatcataaagtggtagaacacattgcattcaaatcgcgcgtaatgaataaagatgtcagacaacttcctcaccgtaacgcatagtgctggtacggttgcgcccatctttcttgctgcgatacagacacgtatcggcttcgaccatcaatttattaaagtcatcggtcagcgttaggtagcttgcgcgaccactaccgacgccaatacttaccgtgagataaagcgttttttgttgccaggtgaatggttgcagttcaacgcctttacggattttttccgccattagcagaccatcgacaggattcacgctcggcactgcaacagcaaattcttcgccgcccattcgcgccaccagccccttatcaccgacaatcttctgaatatgccgggcaaacacgcttaacactttatcgccacattcatgtccatagttatcgttaatgcttttgaaatagtcgatatcaagcagcatgacagtcagatgttgtgtctgtttcaggcttggacttttcagcgcctcataaagaccggaccgactgtaaacctgagtcagaaaatcaaagtcggctcgcagcgcaacttgcttcattaggctattgatcgctgccacgctaaaagaaaccataattgggcatatcgccatcgtggcaataccgagacgtgcggagaacatttgcggaatggagaacgggctaccgacgctgatatcaatcacgctatttgccaccagtacgatttccaccgcaccggtgacaaaggtcaacagacatgttacctgcggcgtatagcgcactgcacaccagattaatgcaggcagcgggaacgccagactccccgctccgccaatgactacgctggcaataacgctcacaataagcgcgatggcgggcatcatctgttctgctttaaagcgcggcagcactccaggaatagccaacgtcagcatacaaggcacgatcaacacgcccgtactgaattgctcactgaaccagtccgcaagcaaaggccagaaatccagactatcaatactgaccgaaccaagatagcatgttcgctgacagcggcggcaaataaaggtaccctgggaatgctattttgtcgttttccgcaattctcatggctgattcatctgtacaaccagccagtgatagattaccgccacgatataacgttgttgttcttcgcttaagctaacaccctgcggaatgttatgccacttagccagacaaccgcgacagcaggtcgcggtggcgtgctgagcgataaacaccggatgcccgcgcatgggggtttgcttaccgtcattagccggtaatgccggagcaagacgtttagcgacaaaatccgccgcatgttgttcgatgactggcgcgcctttctccaggcaatactgacgctctttcatgcccagacgaaagcgagagcgaaatttactacgggataaacgcgcgaagagtggatcgagagactgcattaataaacgctacgccctaactgtttcgtcaattgttcaagaacggcaatacccgcaaggctgttacctgcatcatccagttccggactccagacagcgatggccatttcatgcggaacaatcgccacaataccgccaccaacgccagatttcgccggtagccccacccgccaggcaaactcccccgcgttctggtacataccactggtcgccatcagcgcgttaatttgccgcgcctgcattggcgtcaccactggttcatcaatatgaatagctttcccctgattagccagaaagacaaacgtccgggccagctctacacagctcattttcagagcgcagtaatgaaagtagttttgcagaacggttgtcacgtcatgatggaaattgccaaagctcttcatcagccaggcgatagccgcatttcgcgcggaatgttcaaattcggaacgcgctaccaccgtatcgtaggaaatatcagacacaccgcttaagccgcgcacgacttccagcatacgttgccgtggtgcgcttaatcgcccttgcaacatatcgcagaccaccagcgcaccggcattaatgaacggattacgcggtataccctgctccatttccagttgcactaaggaattgaacggacttccagacggatctttgccgacgcgttgccagatttcctcttcggagtaatgacgcatggcgacaacgagactcagcactttggaaatagactgaatggaaaaacgttcttgcgcgtctccggcctgaaaaagctgtccgtcaacggtacagatagcaatccccaatcgggaaccgtctactgtagccagcgccggaatataatccgcgactttaccctgaccaatgagcggccgcacttgccgcaagatgttttctaaaattgcattatccatggcgactgccactttctactcctggaccgcaggtctgaaaagacctgcgagtatatcagagctgaatatgtcgcgtcagatccggtctttccacaccgtctggatattacagaattcgtgtaagccgaaatgggaaagctcacgaccaaagccactctttttcacgccaccaaaggccactcgcgcgtcgctggcacaataaccattgataaacaccccaccgcattccagacgtgccgccatctgtctggcctgtgtttcgtcagtggtaaaaatggtcgcactaaggccgaactcactatcattagccagttccagtgcatgttctgcatctttcgcaatggtgattgccgcaacggggccaaacatttcttcccgaaacgcggtcatttctggggtaacattcgccagaaccgttggcggatagtagttacctgccccagccatcttttccccgcccagtaacaaacgcgcaccctgcgccagggttttctccacctgatgatgcagctcatcacgtaaatcaaaacgagccattggtccgagagcgttctcttcgtcacggggatcgcccattttcaaggctgccgcagctgccacaaaacgttcggtaaatgcgctagcaattccctcttcgataataaagcgttttgccgctgcacatacctgtccggtattctgataacgtccggctaccgccgctttcaccgccagttccagatcggcatcgttaagcacaataaacggatcgctaccgcccagttccagtacgcattttttcagtgccgctccagcctgtgcgccaatagccgctcccgcacgaacacttccggtcaccgtgacagcagcaatgcggctgtctttaatcatctgactgacaccgtcgttgtcggcattcagccagccatatacgccttgtgggatacccgcatctttaaacacctgggcaatgagctgtgcacagcccatcacattcggcgcatgtttaagtaagtagccgttacctgcaagaatgatgggaacagcgccacgcatcacctgccataacggaaaattccacggcataatcgccagaatcgtccccaacggtcgatactcaataaccgcctgctgattttccaccagcgtaggttccgccttcagcattgccggaccatgttctgcataccagtcacacaaattcgcgcttttcgccacttcagcgcgcgcctggttgattggtttgcccatttcgcgggtgatcatttgcgccatttcttcgctacgagcgcgcagagccttaccgatatcacgcagtttttcagcacgataatctatatttgtctcgcgccagtcgcgaaagcctgctgccgccagctgaagtgcgttttcgatatcgtcagcgccagcccacggcagcacagaaagttgttcacccgtggcaggatttatgctaattgcatgagttgccggagtaatggtcatcggggtatctcctttatgagtcatggtatgaagatacgcagatttactcttgctttaaaatgaataatattaagccacttattcacgaatcgagaatgctatggatctgacccaactggagatgttcaacgcggttgccgaagctggcagcataacccaggctgcagcaaaagtgcatcgcgtgccgagcaatctcactacccgtctgcgccagctggaaacagaactgggggttgatctgtttattcgcgagaatcagcgtttacgtctctctcctgccgggcataactttttacgctatagccaacaaattctcgcgttagtggatgaagcgcggagcgttgtcgctggcgatgagccgcaaggtttattttctcttggtagcctggaaagcaccgctgcagtgcgcattccagccacgctggcggaattcaaccgtcgttatcccaaaattcagtttagtctttccaccggcccttccggcactatgctggatggtgtactggagggaaaactgaatgcggcgtttattgatggacccattaaccatactgccatcgacgggataccggtataccgcgaggaactgatgatcgtcacgccacaaggatatgcgccagtaacccgtgccagtcaggttaatggcagtaacatttatgccttccgcgccaattgtagctatcgtcgccacttcgagagctggtttcatgctgacggtgccgctccgggaactatccatgagatggagtcttatcacggaatgttggcctgtgtgatcgcaggagcaggcattgcgcttattccgcgctctatgctggaaagtatgccggggcatcaccaggttgaagcgtggccgttagctgagcaatggcgttggttaacaacctggctggtctggcgtcgtggtgcgaaaacacgtccgctcgaggcatttattcaactgctggatgtgcctgacagcgcaagacagggatatcaatgagctatttttgatagttcttgcggttaatatgctctatatagtgatgttccgatgacttatgactatatggggcaaatatggttacgccagtaagcatcagcaattacatatctcttcctgatgattttcccgtacgtaatattgcaccgcaggtaaaagaagttttaaaggattttattgatgcacttagtacaataatatgtaatgaagagtggcgcacgtctttaaacatcaacagtgccacaaaaaagatatttaataaccttgacaacttaagttatattcagaggacttcttttcggggtaacgacacgctatacaatgaaaaggttcagtttaaactcacttatcccgccaggaatggaagacacaaagaaaatattgaatttcaggtagtaataaatttaagccctatttatttagataattttcgccatgatggagaaattaatattttttgcgctcccaacccaaagcctgtcactatggggcgcgtatttcagaccggcgtcgagcgtgtactctttctgtttctgaatgattttattgaacaatttccaatgatcaaccctggtgttcccatcaaaagagcgcatacaccacatattgaacccctgcctagcgatcaccataccgctgcagattacttacgccagtttgatttgcttgtcctgaattttatctctcgcggtaattttgtcatactcccccgattatggaataactctgaggttcacagatggttcgtcaataaagatcctaacttgatcaccgccattctcgacataacggacagcgaattaaaagaggatttgttgcaaagcctgatggatagtttaggttctaacaaacatgtactacccgaagtctgcatctgctttttatcccttttagcagaacaagaatctcctcattttcagaacttgtttttatttttcgccaatatgttattgcactatcaccaatttatgaatcccaatgaaagtgatttgaatgacgtgttgatgccagcaagtttaagtgatgataaaattatcaaacatatggcgcgcaggaccctcaaactgtttgtaaaaaatgaaacaccgccaaaagttactcacgaagacctggtgaaaaacaggcctcgctcccctgtcagaccacctatacccgcaaccgccaaaacgccagacctccctgaacgtcattaaaccgtgatgttaccgactctctgacgcgtgaaagaatcagcgtcagagaaacggaaaacgcgatccagatcacaaatgcattgtattcacatcattaaccgttttaagatcatttcatcactttttcgcaactcacccgataatctgttatgacaacaaacactgtttcccgcaaagtggcgtggctacgggtcgttacgctggcagtcgccgccttcatcttcaacaccaccgaatttgtccctgttggcctgctctctgacattgcgcaaagttttcacatgcaaaccgctcaggtcggcatcatgttgaccatttacgcatgggtagtagcgctaatgagtttgccttttatgttaatgaccagtcaggttgaacggcgcaaattactgatctgcctgtttgtggtgtttattgccagccacgtactgagctttttgagctggagctttaccgttctggtgatcagtcgcattggtgtggcttttgcacatgcgattttctggagcattacggcgtctctggcgatccgtatggctccggccgggaagcgagcacaggcattgagtttaattgccaccggtacagcactggcgatggtcttaggtttacctctcgggcgcattgtgggccagtatttcggttggcgaatgaccttcttcgcgattggtattggggcgcttatcacccttttgtgcctgattaagttacttcccttactgcccagtgagcattccggtagtctgaaaagcctcccgctattgttccgccgcccggcattgatgagcatttatttgttaactgtggtggttgtcaccgcccattacacggcatacagctatatcgagccttttgtacaaaacattgcgggattcagcgccaactttgccacggcattactgttattactcggtggtgcgggcattattggcagcgtgattttcggtaaactgggtaatcagtatgcgtctgcgttggtgagtacggcgattgcgctgttgctggtgtgcctggcattgctgttacctgcggcgaacagtgaaatacacctcggggtgctgagtattttctgggggatcgcgatgatgatcatcgggcttggtatgcaggttaaagtgctggcgctggcaccagatgctaccgacgtcgcgatggcgctattctccggcatatttaatattggaatcggggcgggtgcgttggtaggtaatcaggtgagtttgcactggagtatgagcatgattggttatgtgggcgcggtgcctgcttttgccgcgttaatttggagtatcattatatttcgccgctggccagtgacactcgaagaacagacgcaataattgaaaggcccattcgggccttttttaatggtacgttttaatgatttccaggatgccgttaataataaactgcacacccatacataccagcaggaatcccatcagacgggagatcgcttcaatgccacccttgcccaccagccgcataattgcgccggagctgcgtaggcttccccacaaaataaccgccaccaggaaaaagatcagcggcggcgcaaccatcagtacccaatcagcgaaggtactactctgacgcactgtggacgcgctgctaataatcatcgctatggttcccggaccggcagtacttggcattgccagcggcacaaaggcaatattggcactgggttcatcttccagctcttcgctcttgcttttcgcctccggactatcaatcgctttctgttgcggaaagagcatccgaaaaccgataaacgcgacgattaagccgcctgcaattcgcagaccgggaatgctaatgccaaatgtatccatcaccagttgcccggcgtaatacgccaccatcatgatggcaaatacgtacacgctggccatcaagctctgacgattacgttcggcactgttcatgttgcctgccaggccaagaaataacgcgacagttgttaatgggttagctaacggcagcaacaccaccagccccaggccaattgctttaaacaaatctaacattggtggttgttatcctgtgtatctgggttatcagcgaaaagtataaggggtaaacaaggataaagtgtcactctttagctagccttgcatcgcattgaacaaaacttgaaccgatttagcaaaacgtggcatcggtcaattcattcatttgacttatacttgcctgggcaatattatcccctgcaactaattacttgccagggcaactaatgtgaaaagtaccagcgatctgttcaatgaaattattccattgggtcgcttaatccatatggttaatcagaagaaagatcgcctgcttaacgagtatctgtctccgctggatattaccgcggcacagtttaaggtgctctgctctatccgctgcgcggcgtgtattactccggttgaactgaaaaaggtattgagcgtcgacctgggagcactgacccgtatgctggatcgcctggtctgtaaaggctgggtggaaaggttgccgaacccgaatgacaagcgcggcgtactggtaaaacttaccaccggcggcgcggcaatatgtgaacaatgccatcaattagttggccaggacctgcaccaagaattaacaaaaaacctgacggcggacgaagtggcaacacttgagtatttgcttaagaaagtcctgccgtaaacaaaaaagaggtatgacgatgtccagacgcaatactgacgctattaccattcatagcattttggactggatcgaggacaacctggaaagcccactgagtctggagaaagtgagtgagcgtagcggttactccaaatggcacctgcaacggatgtttaaaaaagaaaccggtcatagtttaggccaatacatccgcagccgtaagatgacggaaatcgcgcaaaagctgaaggaaagtaacgagccgatactctatctggcagaacgatatggcttcgagagccaacaaactctgacccgaaccttcaaaaattactttgatgttccgccgcataaataccggatgaccaatatgcagggcgaaagccgctttttacatccattaaatcattacaacagctaattgaaaacgtgacaacgtcactgaggcaatcatgaaaccacttagttccgcaatagcagctgcgcttattctcttttccgcgcagggcgttgcggaacaaaccacgcagccagttgttacttcttgtgccaatgtcgtggttgttcccccaagccaggaacacccaccgtttgatttaaatcacatgggtactggcagtgataagagcgatgcgctcggcgtgccctattataatcaacacgctatgtaatttgttctggccccgacatctcggggcttattaacttcccacctttaccgctttacgccaccgcaagccaaatacattgatatacagcccggtcataatgagcaccgcacctaaaaattgcagacccgttaagcgttcatccaacaatagtgccgcacttgccagtcctactacgggcaccagtaagcttaacggtgcaacccgccaggtttcatagcgtcccagtaacgtcccccagatcccataaccaacaattgtcgccacaaacgccagatacatcagagacaagatggtggtcatatcgatagtaaccagactgtgaatcatggttgcggaaccatcgagaatcaggctggcaacaaagaagggaatgattgggattaaagcgctccagattaccaggctcatcaccgccggacgcgtactgtggctcatgatctttttattgaagatgttgccacacgcccaactaaatgctgccgccagggtcaacataaagccgagcatcgccacatgctgaccgttcagactatcttcgattaacaccagtacgccaaaaatcgctaaggcgatccccgccaattgtttgccatgcagtcgctccccgaaagtaaacgcgccaagcatgatagtaaaaaacgcctgtgcctgtaacaccaggctagccagtccagcaggcataccgaagttaatggcacaaaaaagaaaagcaaactgcgcaaaactgatggttaatccataccccagcagcaaattcagtggtactttcggtcgtgcgacaaaaaagatagccggaaaagcgaccagcataaagcgcaaaccggccagcatcagcggtggcatgttatgaagccccactttgatgaccacaaaatttagcccccatacgaccactaccagtagcgccaacaccccatcttttcggctcattctaccgcctctgaatttcatcttttgtaagcaatcaacttagctgaatttacttttctttaacagttgattcgttagtcgccggttacgacggcattaatgcgcaaataagtcgctatacttcggatttttgccatgctatttctttacatctctaaaacaaaacataacgaaacgcactgccggacagacaaatgaacttatccctacgacgctctaccagcgcccttcttgccagcagcttgttattaaccatcggacgcggcgctacgctgccatttatgaccatttacttgagtcgccagtacagcctgagtgtcgatctaatcggttatgcgatgacaattgcgctcactattggcgtcgtttttagcctcggttttggtatcctggcggataagttcgacaagaaacgctatatgttactggcaattaccgccttcgccagcggttttattgccattactttagtgaataacgtgacgctggttgtgctcttttttgccctcattaactgcgcctattctgtttttgctaccgtgctgaaagcctggtttgccgacaatcttagctccaccagcaaaacgaaaatcttcagtatcaactacaccatgctaaacattggctggaccatcggtccgccgctcggcacgctgttggtaatgcagagcatcaatctgcccttctggctggcagctatctgttccgcgtttcccatgcttttcattcaaatttgggtaaagcgcagcgagaaaatcatcgccacggaaacaggcagtgtctggagcccgaaagttttattacaagataaagcactgttgtggtttacctgctctggttttctggcttcttttgtaagcggcgcatttgctagttgcattagtcaatatgtgatggtgattgctgatggggattttgccgaaaaggtggtcgcggttgttcttccggtgaatgctgccatggtggttacgttgcaatattccgtgggccgccgacttaacccggctaacatccgcgcgctgatgacagcaggcaccctctgtttcgtcatcggtctggtcggttttattttttccggcaacagcctgctattgtggggtatgagtgctgcggtatttactgtcggtgaaatcatttatgcgccgggcgagtatatgttgattgaccatattgcgccgccagaaatgaaagccagctatttttccgcccagtctttaggctggcttggtgccgcgattaacccattagtgagtggcgtagtgctaaccagcctgccgccttccagcctgtttgtcatcttagcgttggtgatcattgctgcgtgggtgctgatgttaaaagggattcgagcaagaccgtgggggcagcccgcgctttgttgatttaagtcgaacacaataaagatttaattcagccttcgtttaggttacctctgctaatatctttctcattgagatgaaaattaaggtaagcgaggaaacacaccacaccataaacggaggcaaataatgctgggtaatatgaatgtttttatggccgtactgggaataattttattttctggttttctggccgcgtatttcagccacaaatgggatgactaatgaacggagataatccctcacctaaccggccccttgttacagttgtgtacaaggggcctgatttttatgacggcgaaaaaaaaccgccagtaaaccggcggtgaatgcttgcatggatagatttgtgttttgcttttacgctaacaggcattttcctgcactgataacgaatcgttgacacagtagcatcagttttctcaatgaatgttaaacggagcttaaactcggttaatcacattttgttcgtcaataaacatgcagcgatttcttccggtttgcttaccctcatacattgcccggtccgctcttccaatgaccacatccagaggctcttcaggaaatgcgcgactcacacctgctgtcacggtaatgttgatatgcccttcagaatgtgtgatggcatggttatcgactaactggcaaattctgacacctgcacgacatgcttcttcatcattagccgctttgacaataatgataaattcttcgcccccgtagcgataaaccgtttcgtaatcacgcgtccaactggctaagtaagttgccagggtgcgtaatactacatcgccgattaaatgcccgtaggtatcattaaccaatttaaatcggtcaatatccaacaacattaaataaagattcagaggctcagcgttgcgtaactgatgatcaaaggattcatcaagaacccgacgacccggcaatcccgtcaaaacatccatattgctacggatcgtcagcaaataaattttgtaatcggttaatgccgcagtaaaagaaagcaacccctcctgaaaggcgtcgaaatgcgcgtcctgccagtgattttcaacaatagccagcattaattcccgaccacagttatgcatatgttgatgggcagaatccattagccgaacgtaaggtaattcatcgttatcgagtggccccagatgatcaatccaccgaccaaactggcacagtccataagaatggttatccgttatttctggcttactggcatctctcgcgaccacgctgtgaaacatactcaccagccactggtagtgggcatcgatagccttattgagatttaacaagatggcatcaatttccgttgtcttcttgatcattgccactcctttttcacagttccttgtgcgcgctattctaacgagagaaaagcaaaattacgtcaatattttcatagaaatccgaagttatgagtcatctctgagataacattgtgatttaaaacaaaatcagcggataaaaaagtgtttaattctgtaaattacctctgcattatcgtaaataaaaggatgacaaatagcataacccaataccctaatggcccagtagttcaggccatcaggctaatttatttttatttctgcaaatgagtgacccgaacgacggccggcgcgcttttcttatccagactgccactaatgttgatcatctggtccggctgaacttctcgtccatcaaagacggccgcaggaataacgacattaatttcaccgctcttatcgcgaaaaacgtaacggtcctctcctttgtgagaaatcaaattaccgcgtagactaacgctagcgccatcgtgcatggtttttgcgaaatcaacggtcattttttttgcatcatcggttccgcgatagccatcttctattgcatgaggcggcggtggcgctgcatcctgttttaaaccgccctggtcatctgccaacgcataaggcatgacaagaaaacttgctaatacaatggcctgaaatttcatactaactccttaattgcgtttggtttgacttattaagtctggttgctatttttataattgccaaataagaatattgccaattgttataaggcatttaaaatcagccaactagctgtcaaatatacagagaatttaactcactaaagttaagaagattgaaaagtcttaaacatattttcagaataatcggatttatatgtttgaaaattattatattggacgagcatacagaaaaagcaaatcacctttacatataaaagcgtggacaaaaaacagtgaacattaatagagataaaattgtacaacttgtagataccgatactattgaaaacctgacatccgcgttgagtcaaagacttatcgcggatcaattacgcttaactaccgccgaaagttgcaccggcggtaagttggctagcgccctgtgtgcagctgaagatacacccaaattttacggtgcaggctttgttactttcaccgatcaggcaaagatgaaaatcctcagcgtaagccagcaatctcttgaacgatattctgcggtgagtgagaaagtggcagcagaaatggcaaccggtgccatagagcgtgcggatgctgatgtcagtattgccattaccggctacggcggaccggagggcggtgaagatggtacgccagcgggtaccgtctggtttgcgtggcatattaaaggccagaactacactgcggttatgcattttgctggcgactgcgaaacggtattagctttagcggtgaggtttgccctcgcccagctgctgcaattactgctataaccaggctggcctggcgatatctcaggccagccattggtggtgtttatatgttcaagccacgatgttgcagcatcggcataatcttaggtgccttaccgcgccattgtcgatacaggcgttccagatcttcgctgttacctctggaaaggatcgcctcgcgaaaacgcagcccattttcacgcgttaatccgccctgctcaacaaaccactgataaccatcatcggccaacatttgcgtccacagataagcgtaataacctgcagcatatccgccaccaaaaatatgggcgaaataactgctgcgatagcgtggcggtatagcaggaagatccatattttccgccaccagcgcccgcaattcaaaatcatcgacatcctgcattgcttcgttttcttccaggcaatgccagcgcatatcgagaagtgcggcgctaagcagttcgctcatctcataccctttgttgaacaggctggcattacgcattttctgttgcagttcgtcaggcattgctgccccgctctgataatgccgggcgtagcgagcgaatacctgcggatgcgttgcccagtgttcgttgatttggctcggaaattcgacaaaatcacgcggcgtgttggtgccggaaagcgtggcataacgctggcgggcaaaaaggccgtgcagcgtatgaccaaattcatggaataaggttatgacatcatcccagagtaacaacgcaggctcaccggcagcgggtttctgataattgcagacgttataaattaccggatgtgttttattaagcgtactttgctcaacaaaattgcccatccatgcaccgccgcttttactatcacgggcgaagaaatcaccgtaaaataacgccagccccacgccattatgatcaaaaatttcccacacacgaacgtcaggatggtagacaggaatatcaaaacgttcgacaaacttaataccgaagagctgattcgcggtccagaatacaccttcatttaacaccgtgtttaattcaaaatatggcttgagctgcgcctcatcaagatcaaatttctcccgccgtacctgttccgcataaaatgcccagtcccacggctgcgcgctaaacccgccctgctgcttatcgataaccgcctgtatggaggctaattcatcgctcgcacgttgacgcgccgctggaacaatttcccgcataaagttaagtgctgcttcaggtgtttttgccatctgatcggcgattttccatgcggcataatgaggaaaaccaagtagtgttgcctgttgtgcacggatctccaccagacgttgaatgatagcgcgggtatcattggcatcatttttttccgctcgcgtccagcccgcaataaacagtttttcacgcgtcgcacgatcgcgcatttcggcaagcgccggttgttgggtggtattcagcagcggaatcagccatttgttatccagacctttctcgcgagccgcctctgccgccagcgcaatctcttgctcactcattcctgccagctgcgcgatatcgttcacaaccagaccgccggatttatttgctgccagtaatcgctggttaaactggctggtcagggtcgcagcttctgtattcagtacttttaattttgctttatcagcttgcgcaagtttggctccggcaaggacaaaacgttgatgaatcacctccaccaggcggatggattcactatcaagccccagggattcacggcgctgccagacagcatctacccgcgcgaataattcaccgttcagatagatatcattagccagttccgccagttcagcggaaaactgctcgtcaagacgctgtaattcatcattggtatgcgccgcagtcatcgcaaaaaagacgctggtaacgcgggtaagtaattctccgctttgttccagtgccagaatagtattgttgaaatcaggcatttgcgggttaagcgcgatggcagcaatttctgcccgcttttgctgcattccctcatcgaatgccgggcgatagtgatgattggcaatttgatcaaaatggggagccagatacggcagtgtgctttgcacaaggaaaggattcattgttgtcattttcttctcctgaacgcgaggtgttccatagcgtaggcttactgataacggagtgcaatcttgcaatccagtattacccgctcttaagcatcccgtgctatgttattgacacacaaaagcgttgaggaacagtgagaagcgcagtgcccagccatcccgatactgctgctttcaccaaatccttagtgcttctttcgtgtttttctattgtcataatggttatctctaaaaaagaggtaagatgcgtactacttactcgccgttattggtattattcagaaaaagtgagtaagactttgcagcaatgtttttgatcctgttcaaataaactaatggcatcagcaacatgctggaaatcaaacgtatgggtaattaatttttctggtttaattaaccctttacttaaccagtcgataacgatcgggaatttatttgcatttaagcgactagagaaaatagagagttcttttccggtaattccttgctgaatcacttcagacggttcactggagaaccccatcaatacaatacgtgccgctggagaagccagcgttacggcctctttcaggatagaaggatgacaagccgcatcgataattaatgtcggcttgatgcctttttcagtgaaaatctcgccaagcggtgtctggctgttattaatcgcccagtcagccccgctctctttcgctttttccagtcgttcatcaatgcgatcggcaacaatcacatttttaacgttatagacgccttttaatacctgaacgatcgtcaggccgattggaccggcaccataaaccagaacggtatcattttcagtcggttgaccatgtccggttacgttagccgcaatggtaaaaggttcgatcattaccgcatattgatcggccactgcttcaggaattttccacgcattttttgccggaaccacggcatattcactgaaaccaccgtcagcgtgcacacctaatacagccagtgtcgtacaaacgttcggtttacctatagagcacggatagcaatgcccacagctgaccaccggatcgacagcaacacgttcaccgactctggcgctttccacgccttcacccactgcatcaatgacgccaaagaattcatgaccaatgacgcgcggatatttcgcaaaaggattatgcccacgataaatatggctatcactaccacaaattccggcaagtttcacttttactcgtacttcacccgcactcggggtgggtatttcacgttcgacaatcgccagttgattcggtttttcaattaatatgcttttcattatcttactccttaccagttccacagcgtgccatcttccagacgtgcgactggtagataagcaggttcatagggatatttcgccgccagcttttcatcgaattcgataccaagacccggtttgtctcccggatgcatatagccgttatcgaaagtccagttgtgcgggaagacttcgagcatttgttcggaataacccatgtattcctggacaccgaaattggggacccacagatcaaagtgcagcgccgcagccatgcagactggactcaaatcggaaggaccgtgactgccagtacgtacctgatacaggctagcaaaatcggcaatccggcgcataccggtaattccgcctgcatgggtcagcgtggtgcggatataatcgatgagttgctcttcaatcagttgtttgcagtcccagatgctgttgaagacttcacccactgcgatgggtgtgacggtatgttggcgaatgagacggaagcattcctggttttccgcaggcgtcgggtcttccatccagaacatgcgataatcttcaatgcttttaccaaagcgcgccgcttcaataggcgttaagcgatggtgcatgtcatgcagcaaatgttcattaaaaccaaacttgttacgtaccgcgtcaaacaatttcggcatgaaatcgaggtatttctccgtgctccacagctgctcttccggccactgtcctttggttgcgggttcataagccagacctttacctttgctcatgccgtaggtggttttcataccagggattccgcactgcacgcggatggctttgaatccaagctcttgatgacgggcataatcatccagagcttcatcaatactgtgaccggtggtatggcaataaaccatcaccccttcacgagacgcgccgccgagtaactggtaaagcggcatgttggcagctttggctttaatatcccacagcgccatatcaaccgcactaatggcgctcatcgtaaccggaccgcgacgccagtaagcacctttatagaaaaactgccagatatcttcgatacggtgcgcatcgcgaccaataagctgcggacaaaggtgatcctgcaaataagaggccacggaaagctcacgtccattgagggtggcatccccaaggcccgtaataccgtcctcagtggtgatttttaatgtgacgaaattacgccccggacaggtaacaaaaacttcagcctttacgatcttcatgttcgattccttgcatcgcttgtcgtgatgcatgaaatctacgcaactgagctactaccatacaagtataaagatcgaaaaaagccggagtgatcacaaaaaaaggcgtatatttgcgctgtgaatggttgacaaaagatgaaatagaataccttttgtcagctgacacttcctcttatcttattgataaaatggatttatgttcttacgtgcgcccccagcccgcaacaatgatcaacatgccgcaaagcgcaatcaacgcacccgtccagtcataaagagtcagtttcacgccatccacaacgcgcagccacatcaacgccgtgcagacataaacgccaccataagccgcgtaaacacgcccactcgccgctggatgcaacgttaacaaccagacaaacagcgccagactaatccccgccggaagcaacagccagatactggcgtttcgttttaaccacaaccagggcagaaagcatccaataatttcacacagcgcagtagcaaaaaatagtaacgttgttttaatcatctttgtctcttattgacatcatgtatagttatagggcgacataatatcatcaatataaacaccctcctggtacgttttgcgtccgcagtggatggtgtagaatcacctttaatcattcatacagggaatgaattatgaaaatcactctcagcaaacgaatcggcctgctcgctattctgctgccttgcgcactggcattgagcacaactgttcatgccgaaactaacaaactggtgattgagtctggcgacagtgcacaaagccgccagcacgccgctatggaaaaagagcaatggaatgacacgcgcaatctgcgccagaaagtgaataaacgcactgaaaaagagtgggataaagccgacgccgcttttgataaccgcgataaatgtgagcaaagcgccaacatcaatgcctactgggagcccaatactttgcgctgcctggaccgtcgaactggccgcgttattaccccctaacctgttattgatttaaggaatgtaaggacacgttatgccaagcgcccacagtgttaagctacgcccgctggagcgtgaagatttacgctatgtacatcaactcgacaataacgccagtgtgatgcgttactggtttgaggaaccctacgaagcctttgttgaactctctgatctgtatgataagcatattcacgatcagagcgaacggcgctttgtggtggaatgtgacggcgaaaaagccggtctggtggagctggtggaaattaaccatgttcatcgccgcgcagaatttcagataattatctccccggagtatcaggggaaaggtctggcaacccgtgccgccaaattagcaatggactatggctttaccgttctcaatctctataagctgtatctgatcgttgataaagagaatgaaaaagcgattcacatttaccgcaagcttggctttagcgttgaaggtgaattgatgcacgagttctttattaatggtcaatatcgtaatgccattcgcatgtgtatattccagcatcagtatctggcagagcacaaaacaccgggtcagactctcctgaagccgaccgcacaataacattaataataatcgatcgtatttttgatggtgtaaacccgttcgacggcgggttttactccttcatcaacaatgattagctgacagtccaccggattagcgtgactgtcatattcacagctctgttttacattaccaacccgttgattattcagtaaagtaaccgctgtgtaatctaattttttgatcggatccgtacttggcgtggcgctgacagataatgttttgtcgttacttttcgtggttttacccagcggataaccctgatcatcatagcgatattccatctgcatttgtttgctgctggctttaatcacgaagccattatcatcggtttcccaactcaccccggcagaaggtaattctgctagctggcattttccctgtaaacgtactctcttctccagcgtctcggcatcacggtaataattggcgtccagtaccagagcgaccacggtattattttccagatccagtaattcgagactatcaaaacagccttcttcgctcaaagtcccagaaacacgtttcgtcacttcaccttgctcatccattaatgtctgagtgaaatcttttaccggaccacgcagcggatcaaaatcgaattcattagagaaactggccatctcaggggtaaaactaagtgttacctctgtgcggtcacatcctgtgaggaatatcgcgagtaagcatggtagtaatttgtatttcacaacagtcaccagagagtagagatgattctcaatcatagtagcaaatacagtactttacacgttaaatgctatgcttaaagaagttatcttcgcgtaaggagcttatgatgaaactcagtacctgctgtgccgcgcttctgctcgccctcgccagtcccgcggtactcgccgcgccgggatcctgtgagcgcatacagagcgatataagtcagcgcattatcaataatggcgtacccgaaagcagcttcacgttaagtattgtacccaatgaccaggttgatcagcctgattcccaggtcgtcggccattgcgctaatgatacgcataaaattctctatacccgcaccaccagcggtaacgtctctgctcccgcgcagtctagccaggatggcgcgcctgccgaaccgcagtaacacattatcgactgaacgccggatatgacaaatccggcgatttgaacatacaacataatcccaccttattactcatacccttctattgatatggattaataattcttaacccaaaatgggtagactccctctattgttagcgcgctaaatattcaatatataaacttttatataacgataaagaacagggagtgagttatgtccaaaaatgaacgaatggtgggcatcagccgcagaacactcgttaaatctaccgcgataggttctctggcgctggctgcaggcggtttttctttgccgtttaccctgcgcaatgcagcagcagcggtacaacaggcccgcgaaaaagtggtctggggtgcctgttccgtcaactgtggtagccgctgtgcacttcgtctacatgttaaagataatgaagtgacctgggtggaaactgacaataccggcagcgatgagtacggcaaccatcaggtacgcgcctgtttgcgcggtcgctccatccgccggcgtattaatcatcccgatcgcttgaattacccaatgaaacgcgtgggcaaacgcggcgaaggcaaattcgaacggattagctgggatgaagccctggatactatcgccagtagcctgaagaaaaccgtcgaacaatatggcaatgaggctgtatatattcagtactctagcgggatcgttggcggcaatatgacccgctctagcccaagtgccagcgcggtcaaacgcctgatgaactgctacggcggtagtctcaaccagtatggctcctacagcactgcgcaaatttcctgtgccatgccctacacctacggcagtaatgatggcaacagcaccacggatattgaaaacagcaagctggtcgtgatgtttggtaacaacccggcagaaacccgcatgagcggtggtggcatcacttatcttcttgaaaaagcgcgcgagaaaagcaacgccaaaatgattgttatcgatccgcgatataccgatacggctgccggtcgtgaagacgaatggctccctattcgcccgggcaccgatgccgcgctggttgcgggtattgcctgggtattgattaacgaaaatctcgttgatcaaccttttctcgataaatactgcgtcggctatgacgaaaaaaccttacccgcagatgcacccaaaaatggtcactataaagcctatattcttggtgaaggtgacgataaaacagcgaaaacgccgcagtgggctagccaaattaccggtatcccggaggaccgtatcatcaaactggcgcgtgaaattggcacagcaaaacccgcttatatctgccagggctgggggccacaacgccaggcaaacggcgaactgactgcacgcgctattgctatgttacctattttgacgggcaatgtcggcatcagcggcggaaatagtggcgcgcgtgaaagcacctataccattaccatagaacgcctgccggtgctggataatccggtcaaaacgagtatctcctgcttcagctggacagatgctatcgatcatggtccgcaaatgacggcaatccgcgacggcgtccgcggcaaagataaactggatgtgcccattaagttcatctggaactacgcgggaaataccctcgttaatcagcattctgacatcaacaaaacgcatgaaattctgcaggacgaaagcaaatgcgaaatgattgtggtcatcgaaaactttatgaccagtagcgcaaaatatgccgacattctgctgccagacctgatgaccgttgagcaggaagatattattcctaacgactacgccggtaacatgggatatctcattttcctccagcctgtcaccagcgaaaaattcgaacgcaaaccgatttactggatcctgagtgaagtcgcgaaacgtcttggacctgacgtctatcaaaagttcacagaaggtcgcacgcaggaacaatggttacaacatctgtacgccaaaatgcttgccaaagatccggcgttaccgtcttacgacgaactgaaaaaaatgggtatctataagcgtaaagatcccaatggccattttgtcgcctacaaagcatttcgtgacgaccccgaggcaaatccacttaaaacgccttccggtaagattgaaatttattccagcaggctggcggaaattgcccgtacctgggaactggaaaaagatgaagtgataagcccattgccagtttatgccagtacctttgaaggctggaactcccctgaacgtagaaccttcccactgcaactgtttggtttccattacaaatcccgtactcacagcacctacggcaatattgatctcctgaaggctgcctgccgtcaggaggtgtggatcaaccctatagatgcgcagaaacgtgggattgccaacggcgatatggtgcgggtgtttaaccatcgtggcgaagttcggctaccagccaaagtaacaccacgtattctccctggagttagcgctatgggccagggagcctggcacgaggccaatatgtctggcgataaaatcgaccatggcggctgtgtgaatacgctaaccactctgcgccctagtccactggcgaagggaaacccgcagcacactaatctggtcgagatcgaaaaaatataacccacgacaaccataaattctggcatgacattttgtttgaaaagcaataagtgagtaatgatgaaaatccataccacagaggcgctcatgaaggctgaaatcagccgtagaagtctgatgaaaacctccgcacttggcagtcttgcgctggcaagcagtgctttcactctgccattttcccaaatggtccgggcggcagaggctccggtagaagagaaagcggtctggagttcctgcaccgttaactgcgggagccgctgtctgttacgtttgcatgtgaaagatgacaccgtgtactgggtggagtctgatacgacaggtgacgacgtctacggtaatcatcaggttcgagcgtgtttacgcgggcgctctatccgccgacggatgaatcatcctgataggttgaaatatcccatgaagcgcgtcggcaagcgcggtgaaggtaaatttgaacggataagttgggacgaagccctggataccatcagtgataatcttcggcggatcctgaaagattacggcaatgaggctgtacatgtcctgtacggaacaggcgtagatggcggaaacatcaccaacagtaacgtcccgtaccgtctgatgaactcttgcggtggttttctcagtcgctatggcagctacagtaccgcacagatcagtgccgcaatgagttatatgttcggtgccaatgatggcaacagcccggatgatatcgccaatacgaaactggtcgttatgttcggaaataacccggcagaaacgcggatgagcggcggtggtgtcacttactacgtcgagcaagcccgcgaacgtagtaacgcacgcatgatcgtcatcgatccacgttataacgacactgctgccgggcgtgaagatgaatggctgcccattcgccctggcaccgatggcgcactggcctgtgcgattgcctgggtactgattactgaaaacatggtcgatcagccatttctcgacaaatattgtgttggttacgatgaaaaaacgctgcccgccaacgcaccacgtaacgcgcattataaagcctatattctgggcgaagggcctgacggcatagctaaaacgccggaatgggcagcaaaaatcaccagcatcccggcagaaaaaattatccagttggcacgagagatcggtagtgcaaaacctgcttatatttgtcagggttgggggccacaacgacattccaacggcgagcaaacatcccgcgctattgccatgctttccgttctcaccggcaacgtcggcataaacggcggcaacagtggcgtacgcgaaggtagctgggatctgggggtagaatggttcccgatgctcgagaatcctgttaaaacgcagatttccgtctttacatggacagatgccatcgaccatggtacggaaatgaccgcgacccgtgatggtgttcgtggaaaagaaaaactggatgtccccatcaagtttttatggtgctacgccagtaacacattgatcaatcaacatggcgacatcaatcacacccatgaggtgcttcaggatgacagcaagtgcgagatgattgttggcattgaccacttcatgacggccagcgctaagtattgcgatatcctgttgcccgacctgatgccaacagagcaagaagaccttatctctcatgaatctgcagggaatatgggctatgtgatcctcgcccaacccgcaaccagtgcaaaatttgaacgcaaacccatctactggatgctgagtgaagtcgccaaacgcttaggaccagacgtttatcaaacctttactgaaggtcgcagtcagcatgaatggatcaaatatctccatgcgaaaacgaaggaacgtaaccctgagatgcccgactacgaggagatgaaaacgaccgggatctttaagaaaaaatgcccggaagaacactacgtcgctttccgcgcattccgtgaagatccacaggcaaacccgttgaaaacacctagcgggaaaatcgaaatttattctgaacgactggcgaagattgcagatacctgggaattgaaaaaagatgaaattattcatccccttcctgcgtataccccaggttttgatggctgggacgatcccctgcggaaaacctatccactgcagttaacgggcttccattacaaagcgcgtacccactccagctacggcaatattgatgtgttacagcaggcctgcccacaagaggtgtggatcaaccccattgatgctcaggcacgcggtatccgtcatggcgataccgtgcgggtatttaacaataatggagaaatgctgattgccgcaaaagtgactccgcgtattctgcctggcgttaccgccatcgggcaaggtgcgtggcttaaagcggatatgtttggtgaccgggtcgatcacggcggcagtatcaatattctgacctctcaccgccctagtccgctggcaaagggaaacccgagccacagcaatcttgtccagatcgaaaaggtttaaggagtagcccatgaccacacaatatggattttttatcgattccagccgctgtactggctgtaaaacctgcgaactggcgtgcaaagattttaaagatcttggcccggaagtcagtttccgccgtatttatgaatacgctggcggcgactggcaggaagataatggcgtctggcaccagaacgtgttcgcttattatctctccatctcctgtaaccattgcgatgaccccgcatgtacaaaagtctgccccagcggcgcaatgcataagcgtgaagatggctttgtggtggttgatgaagatgtttgtatcggctgccgctactgccacatggcttgtccgtacggcgcgccacagtacaatgctgaaaaagggcacatgacgaagtgcgatggttgttatagccgcgtcgccgaggggaaacaacccatatgtgtcgaatcctgcccgctgcgtgcacttgagttcggtccaattgaagagctgcgccagaagcacggcactcttgctgccgtcgcgccactgccgcgcgcgcatttcacaaaacccaatatcgttatcaaacctaacgccaacagccgcccgaccggcgataccactggttatctggctaatccggaggaagtgtaaaatgggaaatggatggcatgagtggccactggttatctttaccgtattgggtcaatgcgtagtaggcgcgctgattgttagcggaattggctggttcgccgccaaaaatgacgcagaccgtcagcgtattgtccgtggcatgtttttcctctggctgttgatgggcgtcgggtttattgcctctgtcatgcacctgggaagcccactgcgggcgtttaactccctgaatcgaatcggagcttctggtctgagtaacgagattgctgccggttccatattttttgccgttggcggattatggtggctggtggcagtcatcggtaaaatgccgcaagcgttggggaaactctggttacttttcagcatggcgctcggcgtcattttcgtctggatgatgacctgcgtgtatcaaatcgacaccgtgccaacctggcataacggttacactacgctggctttcttcctgacggtattgttgagcggtccaatacttgctgccgcaattctgcgggcagctcgcgttacatttaataccacaccatttgccatcattagcgttctggcgctgatcgcttgtgccggggtgattgtgctgcaaggtttgtctctggcgtctattcacagttccgtgcaacaagccagcgcactggtaccagattacgcctccttacaggtctggcgtgtggtattgttatgcgcaggtcttggatgctggctttgcccgctcattcgtcgccgtgaacctcacgttgccggacttattctggggctaatcctcatacttggcggtgagatgatcgggcgtgtgctcttttatggcctgcacatgacagtaggaatggctattgcaggttaacaaattggtgcggggcaacccgcacatttcaggatgttaggaatgacccattttagtcagcaagataatttttctgtcgcggcgcgcgtgttgggcgcgctgttttattacgctccagagagtgcggaagccgcacctctggttgcggtactcaccagtgacggctgggaaactcagtggcctctaccagaagcgagtttagcgccgctggtgacggcttttcagacacagtgtgaagagactcacgcccaggcctggcagcgtttgtttgtcggcccgtgggcactgccgtctccgccgtgggggagcgtctggctggatcgcgaatctgtgctgtttggcgatagtacattggcacttcgtcagtggatgcgcgagaaaggcattcagtttgaaatgaagcaaaacgaaccggaagatcattttggtagtctgctgttgatggctgcgtggttggcggagaatggtcgccagacagaatgcgaagaattgctggcatggcacctttttccgtggagtacacgttttcttgatgtttttatcgaaaaagcagaacaccctttctaccgtgcactgggtgaactggctcgcttaacgctggcgcaatggcaaagtcaactgttaattcctgtcgcggttaaaccgctgtttcgataagatcaccgtaatattgccggatggtgacgattacgcgcaatccggcaataataggttacagtgtcacgtttttttatctcttaaagcacgcactgcttttgcggctggcctcttttgccgcaaaatagtcgcccgtgtttcattgcccatttctgctcatgcatcatctacacatctatccggatctgcgcactatgttccaccgtctgcttatcgcaacagtcgtcggtattctcgcggcctttgccgttgccgggtttcgtcatgcgatgctgctactggagtggttgttcctcaataatgactccggcagtctggtcaatgcagcgacaaacctttccccctggcgacggttgctaactccggcgctcggcggactggcggcgggtttgttgctgatgggctggcagaaatttacccaacaacgccctcatgcgccgaccgattatatggaagcgttgcaaaccgatggacagttcgattacgcagcaagcctggttaaaagccttgcctctctgctggtagtaaccagcggcagtgcaattggtcgcgaaggtgcgatgattcttttagctgcccttgccgcctcctgttttgcccaacgttttacgccacgccaggagtggaaattatggatcgcctgtggggccgcggcgggaatggctgcggcctatcgtgccccgcttgctggcagtttatttatagccgaagtgctgtttggcactatgatgttggcctctctcggcccggtgattatttccgccgtcgtggcattgctggttagcaatctgattaatcatagcgacgcgttactctacaacgtacaactcagtgtgacggttcaggctcgtgactatgcgctgattatcagtacaggtgtgctggcaggtctgtgcggaccactgttgttaacgttaatgaacgcctgtcatcgtggatttgtgagtctcaaacttgcgccgccctggcaactggcactaggcgggttgatcgtgggtctgctttccctgttcacacctgcagtgtggggcaacggctatagcaccgtacaatcctttttaaccgccccaccactgttaatgatcattgccgggatcttcctttgtaaactgtgtgccgtgctggcgagtagcggttccggcgcacccggtggggtctttacaccgacgctatttatcggtcttgccattggcatgttgtatggtcgtagcctgggattatggttccctgatggcgaagaaattacacttttactcggattgaccgggatggcgacactgttggcggcgaccacgcacgcgccgattatgagcacgttgatgatatgtgaaatgaccggggagtatcagctactccccggtttattgattgcctgcgtaattgcgagcgtaattagccggacgttacaccgtgactctatctaccgccagcacactgcgcagcatagctaagcggatgtattgccccagttcacgctgttcggcgcgcggcagataaggcagttcaccaatgagcggtgccggaagttttttacccagcacatcaatgatttccgcataatgcgccagtcctgggttgattcggttagccacccagccaatgagcggcagcccgtcgttggcgatcgcctgagctgttagcagtgcatggttaatgcaaccttcctgaataccgacaaccatcaacaccggcagttgttcctgcactacccattcagagagtggacgcaaatcattcatcagactgcgccagccgccagtcccttctaccacgacatgatcgactttttcggtcaggtttgccaggccgttactaatgagggtgtaattgattgggcaactgtgcgccacgctactttcttcttcgcttaacgcgataggattaactgcttcataaggcagttcgatggtactaacactctgcaacaccagggcatctttattacgcagcccttcgggtgtctctttgctccccttcgctacgggtttatatcccgcaaccgtttttccctgggaggctaacgcttgtagcaatgcgcgggaaaccaccgttttccctacagaagtgtctgtaccggtaataaagaaacgcttcagcatcactaactccaccgttatgcttcacaaatataaaccaggaaaataattaaccttgaaagtctaagttatgctttcctggcccaaattgagatagcgcaaattttggtagaacagttaaaaaatgttaaccctgcaacagacgaatcaacaaagaaccgttatacatcgcgtcttttaccagtgcagcgcctgccatcgtgccctggttagaaaactgagtactctcaacgctgatgtgctgactatacgcaggaagggcctgctgacggatgctgtcactgatgaccgggaagaggatatctgccgctttacttaacggactgccaatcagtattttttgtgggttaaataaattcaccatgatggcaagaatgcgcccgacatgcgcgcccaccccggtaatgatgtcttttgccagtagatcgccgcgcaatgccgcctgacacaaactgtccacggttaacggttgtccatgtaacatgctgctcatggattgattaagacgcagctgtgccagctcaagaatactgtccacgctggcgatggtttcgaggcagccgtgattcccgcaataacagcgtttcccatacgggtcgacctgtgtgtggcctatttccacgagactactgctgcctgcgtgtagcagatgaccatcggtaatgacgcccgcccccacgttgtgatcgataaccacctgaatcacatcgcgcgccccgcgactggcaccaaacaaggcctctgccatcgtccatgcgctgatatcatgctgaatataaaccggaacgccggtatgctgctccagcgcctcgccgagcggcatctcttttacatcctcgtagaacggcatgcgatgtacaataccattttccgtatcaataattcccggcaaggttatggcaatgctagttagacgctcaagttttttctggtggcggataaaaaactgatcgatatgggaaataatacgatccagcaatggcaagtcatcttttaacgccagttcctggctctcttccaccaccagtttgctgctcagatcgcgcagagcaaggaaaatctccccgcgactaatgcgcagagaaagatagtgccaggcttcagtttcaaccaccagccccaccgccggacggccacggttccccgcttctttgatttccagctcttgcaccaggtgtgcttcgagcatctcacggacaattttagtgatactggcaggagccagttgcgccagacgggaaagatcgatacggctgactggaccaagctgatcaatcaggcgataaaccgcgcccgcgttggtctgctttatttgatcaatgtgcccaggctggttttcagcaaccaccgcatactccctatattttcgcgctccgaaataatctgtaggctatggtgaagcacttcaatacgtgtcgtcaaatttttacttaggcatgtgattaacagcacatttttcgggctttttcgctgaaatttccctcacctgagagcattcagcagatgaatacgaaagttacgcgcagccggactttgttcatgatgtttcggccagaccaaccacatttcagaaaccgcatcctcttcagcaatcggcacccagcgcatttcgttgagctgaacacgtttaaaactcgcaggcaaaatactaacacccagaccggcggaaaccagaccgatgatggtcattgcctcgcccacctcctgagtgatgacgggcgtcaaatggtaacgtcgcatcagcccgagaatatcgtcatacagccctgtcccgacgtgcggatcaaaaaagacaaagggttctttcgccagttcagccagcgttacattcgggttatttgccaggggatgatcgtgcgggatcatcgccataagcggttcatggacgatgactgcgtgttcaaggctctccggtaacgctgtgttacgcagcaatcccatatccagcgttccttcaatgagcggagcgatttgctcgcgagtgttcatttcgcgggtttgtaaatggacatcaggataatcacggcgaaacaggcttaacgtatcggacaccgcccgaataaaaggagcgctgctagtaaaaccaatgcgcaactcccccgcttcaccctgatgcagcctttcagcgcgagcggcagcgtcatccaccatagacaggatttgccgactatctgcaagaaactgttttcctgctgccgtcagcaatacactgcgattggttcgtgccagcagtcgggcaccaatttgttgctccagcgcctgaatctgctgacttagcggcggttggctaatattcaggcgggcagcggcgcgcccgaaatgcagctcttccgcaacagcaacaaagtaacgcagatgacgaagttcaatattcatatttaaaacatcttatttgagattattaatatattagacagaacaattcgattttcctaccctatgtataagcctgatctacaggcatatttagcaaggatttcaagtgagccgtactacaactgttgatggcgctccggcaagcgacactgacaagcaaagcatttctcagccaaatcaatttattaaacgcggtacgccgcaatttatgcgcgtcaccctggcgctgttctctgccggactggcaacatttgcacttctctattgtgtgcagcctatccttccggtgcttagccaggagtttggcttaacccccgcgaacagtagtattagtctgtccatttccacggcgatgttggctattggtttgctgtttactggcccgctatccgatgccattggtcgcaaaccagtgatggtcacggcgctactgttggcctccatttgtacgttacttagcacaatgatgaccagctggcacggcattttgattatgcgcgccttgattgggcttagcttaagtggcgtggcagctgttggcatgacttatcttagcgaggaaatccatcccagtttcgtggcctttagtatggggttgtatatcagcggcaacagtattggcggcatgagcggacgcttaattagcggtgtcttcacggactttttcaactggcgaattgctctggcggcaatcggttgtttcgcgctggccagcgcgttgatgttctggaaaatcctccctgaaagtcgccattttcgcccgactagcctgcgccctaagacgttgtttatcaactttcgtctgcactggcgtgaccggggattaccgttattgttcgcagaaggctttttgctgatggggagcttcgtcacgctgtttaattacatcggctatcggttgatgctctccccctggcatgtcagtcaggccgtggttggcttattaagcctggcttatttgaccggtacatggagcagtcccaaagccggaaccatgaccacccgctatgggcgtggtccagtgatgttgtttagcacgggggttatgctgtttggtttactgatgaccttattcagcagcctgtggctgatctttgccggaatgttactcttcagtgcaggattcttcgcagcccacagtgtagccagcagctggatcggcccccgcgcaaaacgcgctaaaggccaggcctccagcctgtatctgttcagttactatctggggagcagtattgccgggacgctgggtggtgttttctggcataactatggctggaacggcgtcggcgcatttattgctctgatgctggtcattgctctgctggtcgggacgcgtttgcatcgtcgtctgcacgcctgaaaaataagtccggactgcggtaaatacccgtccggacttattgccagctcaaaccaacgttaatagccatcctaaaatagacgaagcgccagccaattcccgcagcgcgtctagcgtcatcaggattataagtacccaaataaacggattcattttgctgtgtgtcatttattactgatgcgcagttattctactgctttgtaagtagtaaaatagttaacccgatcaagactactattattggtagctaaatttcccttaagtcacaatacgttattatcaacgctgtaatttattcagcgtttgtacatatcgttacacgctgaaaccaaccactcacggaagtctgccattcccagggatatagttatttcaacggccccgcagtggggttaaatgaaaaaacaaattgagggtatgacaatgaaaaaagtattagctctggttgttgccgctgctatgggtctgtcttctgccgcctttgctgcagagactacgaccacacctgctccgactgcgacgaccaccaaagcagcgccggcgaaaactacacatcataaaaaacagcataaagcagcacctgcccagaaagcgcaggcggctaaaaagcatcataaaaatacgaaagctgaacagaaagcccctgaacaaaaagcgcaggcagcgaagaaacacgccaagaaacacagccatcagcaaccggcaaaacctgctgcacaacccgcagcgtaagttttcaacagtaatgctggcgcgccccctcgcgcctgaaaattacggtgctaagcgggtaacgtttagcaccgcctttagcggagggtagtatggtgggccgttatcgctttgagttcattctgatcatccttattttatgcgcactgattaccgcccgtttttatctttcctgattgtagttatctgattttactcccactttcatcccgtcccgtctatagtatttatgagggtttgcttttaataatcataattacccaccagagtgtgatatgcgtacaaccattgctgtagtgttgggtgcaattagtttgacgtctgcttttgtgtttgcagataaaccagacgttgccagaagcgcaaacgatgaggtcagcaccctgttttttggtcatgatgatcgtgtgccagtgaatgacacgacccaaagtccgtgggatgcggttgggcaactggaaacggccagcggcaatttatgtacggcgacgctgattgcacccaatctggcattaacggcaggacactgtttattgacacctccaaagggtaaagccgataaagcagtggcgctgcgttttgtgagtaataaaggtctttggcgctatgagatccacgacatagaaggccgcgttgatccgacactgggaaagcggttaaaagcagatggggatggttggattgtacctcccgcagccgcgccgtgggacttcggattgattgtgctacgtaatcccccttctggcattacgccgttgccgttatttgagggagataaagccgcgcttaccgccgcattaaaagcggcaggtcgtaaagtgactcaggcaggctaccctgaagatcatctcgatacgttgtacagtcatcaaaactgtgaagtgactggctgggcgcaaacgagcgtgatgagtcatcagtgcgataccttgccgggtgacagcggtagccctctgatgttgcataccgatgacggctggcaattaattggggtgcaaagtagcgctcctgccgcgaaagatcgctggcgcgccgataaccgggccatttctgttaccggttttcgcgacaagctggatcaactgagccaaaaataatgttcaaacgctgcccgacagcgcgggcagcgtcttcatcaggcaagtttcaccatgatcattccagccaacagcaagaccaggccaatccagcctttacgatttaaccgttgaccaaacaagatccaacctgcggctaacgtggcggcaataccaaacccgccccacaatgcataagcgacagacaagtcgatccctttaacggcttgagaaagcgcactaaaggcagccagcaccgccgccagggagagcaagccaaatattttgcgacgaaagccgtcagaaaatttcaaaaagacgttagcaacgatttccagcacgattgccaatgccagccaggcggcgtgaacccattcaaactgcgccatggttcacctccagttcaggtttacgcgctttacgggtaccactttttatcaacacaatcccggcgaccagggtggttaacccggcaattttcatcaggcttaaactttcgtcgaataacaaaacgctaaacaaggtaataaataaaataccgataccttcccacagcgcataagctacgcctaaggcgatttttttaacggcgaaagagagaaatatatagctcagagaaatcatcaccagcattaaaataaagccgccatttccctcactgacgctcgcccatttcatactcagcgtaccggtaatttctgtagcaatagccagacctaataaaatccaataaatatacattgtccttctcctgcaagagaattattttaattttcgcttaattcagcgaaaccaaagtaaagtggtcaagccccgcgcatagcgcaagctttggcagaagaaaggactaaagcgcgttgcgccagtgctgctcacctacgagcaagatagtggatgaggtacgaagatgggtaaatgtagaaaataacgtcctgaacaaattgtccataatattacaattatccgcagtgttgcttctcgtcatcgcggatgataattgtcctcggtagttgaacacgcctgatttgtatcatagcttaagaattaactcaaaatattttcacttctttacctgagcggtttgattttcgttatgatgacggagcgaaaaagacattattattagcaaaggaagaaaaaacggggacaagcatggcaaagccgatcatcacgctcaatggcctaaaaatcgtcattatgttgggaatgctggtcattattctctgcggtatccgttttgccgccgagatcatcgtgccgtttattctcgcattatttattgctgttattcttaacccgctggtgcaacacatggtccgctggcgtgtgccgcgtgtactggcggtgagcattttgatgaccatcatcgtgatggcgatggtgttgctattagcttatctgggttccgcgctcaacgagttgacgcggacgttaccgcaatatcgcaactctattatgacgccgctgcaagcgcttgaaccgttgttgcaacgcgtagggattgacgtcagtgttgaccagctggcgcattatattgatccgaacgcggcgatgacgttgctcaccaacttattgacgcagttatctaatgccatgagtagtatatttttattgctgctgacggtgctgtttatgctgctcgaagtgccacaattgcccggaaaatttcagcaaatgatggcgcgtccggttgaagggatggcggcgattcaacgtgcgattgacagtgtttctcattatctggtgctgaaaacagccatcagcatcatcaccggcctggtcgcctgggcgatgctcgccgcactcgatgttcgcttcgcttttgtctggggattgctggcctttgcgcttaattacatcccgaatattggtagtgtcctcgcggcaatcccccctatcgctcaggtactggtgtttaatggcttctacgaagcgttgctggtgctggcgggatatctgctgattaatctggtcttcggcaatattctggagccgcgtatcatggggcgtgggctggggctttccacattggtggtatttttgagcttgattttttggggatggttgttaggaccggtgggtatgctgctttccgtgccgttgacaattattgtcaaaattgcgcttgaacaaacagcgggaggtcaaagcatcgccgttctgttaagcgatctcaataaagagtgacggcctcagcagaggccgtcagggttacagagctttcaggattgcatccacgctggctttggcgtcaccaaacagcatgtgggtgttttccttgaagaacagcgggttttgcacaccagcatagccagtgttcatgctacgtttaaagacaatcacgttctgcgctttccacacttccagcacaggcataccagcaatcggactcttcggatcatcctgcgccgccgggttaaccgtatcgttagcaccaatcaccagtacggtatcggtatcagcaaagtcatcattgatctcgtccatttccagcacgatgtcatacggtacttttgcttcagccagcaatacgttcatatgtccaggcaaacgccccgcgaccgggtggataccgaaacgcacattaataccacgagcgcgcaatttctcagtaatttcagcgacaggatattgcgcctgcgcgactgccatgccgtaccccggagtaatgatcacactatgggagtttttcagcagttccgctgtctcttctgcggtgatttcgcggtgctcacccacttcctgatcatcgccagtagaagagccgtcggtgccgaaaccacccgcaataacgctgataaaggaacggttcatcgccttacacataatgtaagaaaggatagccccgctagaaccgaccagcgcaccggtcacaatcagcaggtcgttgctgagcataaagcccgcagccgcagccgcccagccggagtagctgttcagcatgctcaccaccactggcatatctgcaccaccgatggaggcgactaaatgccagccgaataccagcgcaattgcggtcattatcagcaatgccagcacttgcaggccgacgctgtccgtgcgaacaaatacaatcagcagcaggaaggaaacgaccagagccgccaggttcattttgtgacggtttggcagcatcaatggtttagagctaatcttgccacacagtttgccgaacgccaccacgctacccgtgaacgttaccgccccgatgaagataccgaggaacacttccgtcaggtgaatattgaccagaatcggtgccattcccgcgtcatgatgcagatagctgttaaagccaaccagcactgccgccagacccacgaagctatgcaggatcgccaccagttctggcatttcggtcatttcaactttcttcgccagacggataccaattgccccaccaatgaccatcgccagcaagatccagccaacattacccgtatccggtccaaaaatggttgcgattaacgcaatcgccatcccggcgataccgaagttgttaccctggcgagacgtttcatgtttgctaagaccggccagactgaagataaacaggatcgcggcaacaatgtatgcagctgtaactaatcctccagacatatgttaccccttaatttttgcggaacattttcagcatgcgctgagtcacggtgaagccaccgaaaatattaatgctggctataagcaccgcgataaaactaaggaagctaacccagccgccctggccaatctgcaacagtgctccgacaacaataatcccactaatcgcgttggtgacgctcatcaacggtgtatgcagcgcgtggcttacattccacaccacgtaataaccgacaacgcaggccagcgcgaaaacggtgaagtgcccaaggaattctttcggcgcaacgcttgccatccagccaaaaagaatgattgccagcgccatcaacgcgtatttacgccacggactgcaggtacatttttcctcagttttcacttccggtgccgctttttgtgccgcctgcggctgagcacttacctgaatcggcggtgccggccaggtaatttcgcccgcacggatcacggtcacgccgcgaatcaccacatcatcaaaatcaacagtgatattgccgtctttctctttgcacaacagtttcagcagattaacgaggtttgtgccgtaaagctgactggattgcgtcggcagacggcccggaagatcggtataaccaatcactttgacaccattttccgtagtgaagatttcacccggcacggtgtattcacagttgccgccgttttgggctgccaggtcgacaatcacactgcccgccttcatggagtcaaccatttcacgggtaattagcttcggcgctggtttgcctggaataagcgcggtggtgacaatgatatcgacctcttttgcctgggcggcaaagagttccatttccgctttgatgaacgcgtcgctcatcactttggcatagccatcgccgctgccagcttcctctttaaaatccagctcgaggaattccgcgcccatactttgaacttgttctttcacttccgggcgggtgtcgaatgcacgcacaatcgcgccgagactgtttgctgcgccaatggcggccagacctgcaacacccgcaccaatcaccatcacttttgccggtggcactttcccggccgcagtaatttgcccggtaaagaagcgcccaaattcatgtgccgcttcaacaatggcgcgataaccggcgatgttcgccatgctgcttagtgcgtccaggctttgtgcgcgactgatacgcggcacagagtccatcgccatcacggtcacgttacgttccgcaagtttttgcattaattccggattctgcgcaggccagataaaactcaccagcgttgtcccaggattcagtaacgcaatttcatcatctaacggcgcattgaccttcagaatgatctcactctgccagacgctattcccttctacaatttcagcgcccgcttgcacaaacgctttatcgtcaaaacttgccagttgacccgcgccgctctctaccgcgacggtaaaacccagtttcagcagctgttccactgtttttggcgttgctgcaacacgggtttcattggttaaccgttctcttggtatgccaattcgcatgatattcccttccatcggttttattgatgatggtttgcctgtgtcaggagccacacaagctgctcatgtacgagctaaatgttactccgttaaaataaattagtaacaaacgccctataacgtactgaaaattatgcctgtgatctagcgccaaaaatcagtatttcggcgtgaactcgcaaaatattaacgattcagccgtgatagtgggataaacaccttagaacgccggataaagactgataattgtcttcgacggtcgggtaaaacgagacatcgccccggcacgaatcactacttaacattaaattaacttatacaattcagttgcttcagtagtaatgatgctgatacggctgttttttaagcatagacggtcatttgagcaggattaaaattggcttaaggaatgtgatatgaaaaatgacgcagacagttacaccgtttaaatgcaataatcagccacgtttctcgttaataacaataccagtacctggtttgcgcaaggcgaaggattatttttatgaagcttaagaacaccctcctggcgagcgcactgctttctgctatggcattctccgttaacgcagcaacagaactgacaccggagcaagcggcagcggttaaaccttttgaccgtatagtggttaccggtcgttttaatgctattggcgaagcggtgaaagccgtttctcgtcgcgcagataaagaaggtgccgcctctttttatgttgtcgacacttctgattttggtaacagcggtaactggcgtgtggtcgctgacctctataaagccgatgctgaaaaagcagaagaaacaagtaatcgcgtaattaacggtgttgtcgaactgccgaaagatcaggctgttctgattgaaccgtttgacacggtcaccgtccagggcttctatcgtagccagccagaagtcaatgatgccatcaccaaagcggcaaaagcgaaaggtgcctactctttctacatcgttcgtcaaatcgatgccaaccagggcggcaaccagcgtattactgcattcatctataaaaaagatgctaagaaacgtatcgtccagagcccggatgtgatcccggcagattccgaagcaggacgtgcagctctggctgccggtggcgaagccgcgaagaaagttgagatcccgggtgttgcgactaccgcaagtccaagttctgaagtcggtcgcttctttgaaacccagagtagtaaaggcgggcgttacaccgtcacgctcccggatggcactaaagtcgaagaactgaacaaagcgaccgcagcgatgatggtcccgttcgacagcatcaaattctctggcaactacggcaacatgaccgaagtctcctatcaggttgcgaaacgtgccgcgaagaaaggtgctaagtattaccacatcacccgccagtggcaggaacgtggtaataacctgaccgtcagcgcagatctgtataaataactattcagttactcctataaggcggcttgatgccgcctttcgcatttttagtcacaaatttccccgcgaccattgcatgcagacacatctcttcgtaaaatcccgcgcttcagtggcaaactccatttttatgcgttttgccctaatatttattcttcttatcacgttttaatcactggatatcgatggaaaagaaactgggactgagcgcactcaccgcgctggtattaagcagtatgctgggcgcgggtgttttcagtctgccgcaaaatatggcggcagttgccagcccggcagcactgctcatcggctggggtattactggcgctggcattttattgctggcctttgccatgctgatcctcacgcgcattcgtcccgaacttgacggcggtatctttacctatgcccgcgaagggtttggcgagctaatcggcttttgttccgcatggggatactggctgtgcgcagtcatcgccaacgtctcctatctggtgatcgttttttccgcgttaagcttttttacggacacgccggaattgcgcctgtttggcgatggtaatacctggcaaagcatagtcggtgcaagcgctttattgtggattgttcactttttgatcctgcgcggggtgcaaaccgctgccagcattaacctggtggcgacactggcaaaattgttgccgctgggtctgtttgttgtgctggcgatgatgatgttcaaactggataccttcaagctcgacttcaccggacttgcacttggcgtacccgtttgggaacaggtgaaaaacaccatgctgatcaccctgtgggttttcattggtgtggaaggtgccgtggttgtttctgcgcgtgcgcgtaataaacgtgatgttggcaaagcgacactgctggcggttctctccgctctgggcgtttacttgctggtaacgctgcttagcctgggtgtggtggcacgtcctgaactggctgaaattcgtaacccgagtatggccggtctgatggtggaaatgatgggaccatggggcgaaatcatcatcgctgccggtttgatcgtttccgtttgcggcgcgtacttaagctggaccatcatggcagcagaagtaccgttcctggccgccactcataaagcattcccgcgcatttttgcgcgccagaacgcacaagctgcgccatccgccagtctgtggttgaccaacatctgcgtgcaaatttgtctggtactcatctggctgaccggttccgattacaacacgttgctgaccatcgccagtgaaatgattctggtgccctatttcctggtcggcgcgttcttgctgaaaatcgcaacccgtccactgcataaagcggtaggtgtcggtgcctgcatttatggcttatggttattgtacgcctctggtccaatgcacttgctgttatccgttgttctgtatgcaccggggctgctggttttcctgtacgcgcgcaaaacgcatacccatgataatgtactgaaccgtcaggaaatggtgctgattggcatgctgttaattgccagtgttccggcgacctggatgctggtgggataacgttcatcccatcgttggatagcaaaggagataacgatgggtaaaacccagcccttgccaatattaattactggcggaggtcgtcgcatcggcctcgccctcgcatggcatttcattaatcaaaagcaaccggtgattgtcagctatcggacacactatccagccattgatggactgattaatgcaggtgcgcagtgtattcaggctgattttagcaccaacgacggtgtgatggcgtttgccgatgaagtactaaaaagcacccatggtctgcgtgctattttgcataacgccagtgcgtggatggcggaaaaaccgggtgcgccactggccgacgtactggcttgcatgatgcagatccacgttaataccccatacctgctcaaccatgcgctggaaagattactgcgtgggcacggacacgccgccagcgatatcattcactttaccgattatgtggtggagcgcggtagcgacaaacatattgcgtatgctgcaagcaaagcggcactggataatatgacccgcagctttgcccgcaagctggcaccggaagtgaaagtgaattctattgcgccaagcctgatcctgtttaatgaacatgatgatgccgaatatcgacaacaggcgctgaataaaagtctgatgaaaaccgcgcctggcgagaaagaagtgatcgacctggtcgattacttacttaccagttgctttgtcaccggacgcagtttcccacttgatggcggtcgtcatctgcgttaatgcagctttatccagcatataatcaacacccatgcgcttatcccccaacacgcaacagaaccaacaaaagcggcgggcaagcgcatcattccggtgaaataccacaggctcaccaggtaaacaaaatagggaataatgctccacatactaaaaatgatggttgcgcgtaaggcttcaatgccgcgttcgctggcaacaatataatgcgcgataagcgcaaaggtcgggaaaagtggaatcagcccggcgatataataatttttcgtttttgctaaaacaccaatcaacagcactaccagcgcaccgagcgcggctttgattaccagccccatctttttaccttaacacttccataacaagtcatcagtagaatacctgatgaaaacttgtttagaaacgattgatagtaagtaaaaacagcgcggtgtattgtgacgtttttatatctaccgtgaatgttatgaacactatcgtatttgtggaagatgatgcggaagtcggtagtctgattgccgcgtacctggcaaaacatgatatgcaggttaccgtagagccgcgcggcgaccaggccgaagaaaccattttgcgagaaaatccggatttggtgttactcgacatcatgctaccaggcaaggacggcatgaccatttgtcgtgatttacgcgcaaagtggtctggaccgattgttcttctaacctctctcgatagcgatatgaaccacatcctggcactggaaatgggtgcctgcgactatattctcaaaacgacgccccctgctgttttgctagcgcgtttacgtttgcatttgcgtcagaatgagcaagccacactgaccaaaggtcttcaggaaacgtctctgactccctacaaagccctgcatttcggcacgttgaccatcgatcccatcaaccgcgtagtcaccctggctaacactgaaatcagcctcagcacagctgatttcgaattattgtgggaattagctacccatgccgggcaaatcatggaccgcgatgcattgctgaaaaatttacgcggcgtcagttatgacggactggatcgtagcgtggacgtggctattagccggttaagaaaaaaactgctcgataacgccgcagaaccttatcgcattaaaactgtgcgtaacaaaggctatctttttgcgcctcatgcatgggaataagcgatgaaaaaactgtttatccagttttacctgttattgtttgtctgcttccttgtgatgtctctgctggttgggctggtgtacaaatttaccgccgaacgcgcgggcaaacagagcctggatgatttgatgaacagtagcctgtatctgatgcgcagcgaattgcgtgagatccccccacacgactggggtaaaactctgaaagagatggatttaaatctctctttcgatctgcgtgtcgagccactgagtaaataccatcttgatgatatttccatgcaccgactgcgtggcggcgaaattgtcgccctggacgatcagtacacgtttttgcagcgtatcccgcgcagccactacgtgctggcagttggtcctgttccttatctttattatctccatcagatgcgattgctggatatcgccctgatcgcttttattgctatttccctcgcctttccggtgtttatctggatgcgtccgcactggcaggatatgttaaaactggaagcagcggcgcaacgatttggcgatgggcatctcaatgaacgtatccactttgatgagggtagcagctttgaacgacttggcgtcgcatttaaccagatggcggacaatatcaacgccttaattgccagcaaaaaacagcttattgacggtatcgctcacgaactgcgaacaccgttagtgcgcctgcgttatcgactggagatgagcgataacctgagcgccgccgaatcccaggcgttgaatcgtgatatcagtcaacttgaagctttaattgaagagctgctgacttatgcccgactcgatcgcccacaaaacgagcttcatcttagcgaaccagacctgccgttgtggctgagtacgcatctggcagatattcaggcagtaacgcccgataaaacggtacggataaaaacgctcgtgcaaggccattatgcggcgttggatatgcgcttaatggagcgcgtgctggataatttgctcaataacgccctgcggtactgccatagtacggttgaaaccagcctgctactgagcgggaatagagcgacattaattgttgaggatgatggcccagggattgccccagaaaaccgcgaacatatctttgaaccttttgttcgcctcgatcccagccgggatcgcagtaccggcggctgcgggctggggctggcaattgtccactctatagcactggcaatgggcggtacggttaattgtgacaccagcgaactgggtggtgcccgcttcagctttagctggccgttatggcataacatcccgcaatttacctctgcctgacactacgcgcacgatggtcaagtcaccacgactgtgctataaaataagtatgttgtaactaaagtggttaatattatggcgcgttacgatctcgtagaccgactcaacactacctttcgccagatggaacaagagctggccatatttgccgctcatcttgagcaacacaagctattggttgcccgcgtgttctctttgccggaggtaaaaaaagaggatgagcataatccgcttaatcgtattgaggtaaaacaacatctcggcaacgacgcgcagagcctggcgttgcgtcatttccgccatttatttattcaacaacagtccgaaaatcgcagcagcaaggccgctgtccgtctgcctggcgtgttgtgttaccaggtcgataaccttagccaagcagcgttggtcagtcatattcagcacatcaataaactcaagaccacgttcgagcatatcgtcacggttgaaagtgaactccccaccgcggcacgttttgaatgggtgcatcgtcatttgccggggctgatcacccttaatgcttaccgcacgctcaccgttctgcacgaccccgccactttacgctttggttgggctaataaacatatcattaagaatttacatcgtgatgaagtcctggcacagctggaaaaaagcctgaaaagtccacgcagtgtcgcaccgtggacgcgcgaggagtggcaaagaaaactggagcgagagtatcaggatatcgctgccctgccacagaacgcgaagttaaaaatcaaacgtccggtgaaggtgcagccgattgcccgcgtctggtacaaaggagatcaaaaacaagtccaacacgcctgccctacaccactgattgcactgattaatcgggataatggcgcgggcgtgccggacgttggtgagttgttaaattacgatgccgacaatgtgcagcaccgttataaacctcaggcgcagccgcttcgtttgatcattccacggctgcacctgtatgttgcagattaacgcccggctttcatactgccgaccatctgttctggccgtacccagctgtcaaactcggcttcgctaagataccccagcgcaagggccgcagcttttaaggtcagcccttctttatgcgcttttttggcgatctcggcggctttgtcataaccaatgtgggtgttaagcgcagtcaccagcatcaggctttcattgagtaattgattgattcgctcacgattcggttcaatacccactgcgcagtgtttgttaaaactttccatgccatctgccagcaagcgcacgctttgcaggaaattgtggatcaccattggacggaagacgttcagttcaaagttaccggaagcgccccccatgttgatcgccacgtcgttccccatcacctgacagcagagcatggttaatgcctcacactgtgttgggttcactttccccggcatgatactgctgcccggctcattttccgggatactgatttcaccaattccgcagcgcgggccagaggccagccagcggacatcattggcgattttcatcagactcgcagccaaccctttcaacgcgccgtgcgcctgaaccagggcatcacaggtcgccagcgcttcaaatttgttcggcgcggtaacaaacggtgcacaggtaatgactgccagttcatctgctacgcgacgcgcatactccggatgggtatttagtccagtacccaccgctgtaccgccaagagccagttccgctacgtgaggcaggctgtattcgatatgtttgagattatgctcgagcatcgctacccagccggaaatctcctgccccagcgttaacggcgtggcatcctgcaagtgagtacgaccaattttgacgatatcggcaaaagcacgggatttctcattcagtgtctgtgtcagggttttaagctgaggaatgagttgcttgcgcagcgccagcagcgccgcaacgtgcatcgccgtcggaaagacatcgttggaactttggcttttgttcacgtcgtcgttagggtgaactttacgttccatcccgcgcacaccgccgagtaattcactggcccggttagccagcacttcgttcatgttcatgttactttgcgtgccggagccggtctgccagatagccagcgggaattcgtcgtcatgctgtcctgccagtacttcatccgccgcctgacgaatggcgctcgctttctcttcagacaacaagcctaaatcttcattaacttttgccgctgcacgcttggttagcgccagcgcatgaatcagactggtgggcattttctccgtgctaatgcggaaatgctccaggctgcgttgagtttgtgcgccccacagcttatctgccgggacatcaatcgcccccatgctatctttttcgctgcgtactgtattcatgacctgctcctcacctgattaattttttctttctgttttgctttcgttaagcaacttttagctcacttattatttaccatttgataacaaatgtttggtctttcgtgccatgtaaaaaaaccgccccgaagggcggctctgtttatttcacacagcgggtgcattgtgtgagttgtatctgctggaagaagtcatttcctttatcatccacaaggataaacgccgggaaatcttccacttcaattttccagatggcttccattcccagttccggatattcaacacattccaggctcttaatacttccctgcgccaatacagcggccggaccaccgatactgccaaggtagaagccgccgtgttttttacaggcatccgtcacctgctggctgcggttgcctttcgccagcatgatcatacttccgccctgcgcttgcagttgatcgacataagaatccatccgtccggcggtcgttgggccaagagaaccggaggcataaccttccggcgttttggccggacccgcgtagtaaatcggatgatctttgatgtactgcggcagcccttcaccgttatccatccgctctttcagtttggcgtgagcaatatcacgaccgacgataatcgtgccgttaaggcttaagcgtgtagaaacgggatactggctcaactgtgcgaggatctctttcatcggacggttaaggtcaacgcgcaccgcttcgccttctcccgctttgcgcagctcttccgggatatatttgcctggattatgttccagtttttcgatccagatcccctgacggttgatcttcgctttgatattacggtcagcagagcaggagacgcccataccgaccgggcaggatgcgccgtgacgtggcaggcgaatcacgcggatgtcgtgagcgaagtatttaccaccaaactgcgcacccagaccaagattttgcgcttcgatcagcaattctttttccagttccacatcgcggaacgcctgaccgtgctcattcccttccgttggcagttcatcatagtatttcgcggaagccagtttcaccgttttaaggttcgtttctgcagaagttccaccaataacgaacgcaatatgatacggaggacaggccgccgtacccagcgtgcgcatcttctcaaccaggtaatttttcagtttccccggcgtcagtaacgctttggtttcctgatagagatacgtcttgtttgcgctaccaccacctttggcgatacagaggaatttgtattcgtcgccatcaacggcataaagatcgatctgcgctggcagattggtgccggtattcacttctttatacatatccagcggcgcgttttggctgtagcgcagattatcttcgatataagtgttatagacaccgcgcgccagcgccgcttcatcaccaccaccggtccatacacgctgcccttttttaccaacaataatcgcggtgccggtatcctgacaggttggcagaacgcctttcgccgcgatgtcggagttacgcaggaattgcagcgccacatatttatcattttcgctggcctccgggtcacgcagaatgtcggccacctgttgttggtgcgccggacgcagcatgaagctcgcatcatgaaacgcctggcgcgccaacagagttaacgcttcgggtgcgactttcaaaatctcctgcccttcaaattcagatacgctaacgtgttcgctggttagcaggtaatactcagtatcatcttttttgagtggaaaaggagcctgataatgaaagggtttgttactcattgttctctcacttactgcctggtttggttatgctctgggcgggtgttccgttgccctgttaaaagcgagtaacaatatcctacacacttttttaacaaaaactgagactagtacgactttttgcggctccaggttacttcccgtaggattcttgctttaatagtgggattaatttccacattaaaacagggattgatcatgcaaaaactcattaacagtgtgcaaaactatgcctggggcagcaaaacggcgttgactgaactttatggtatggaaaatccgtccagccagccgatggccgagctgtggatgggcgcacatccgaaaagcagtagtcgagtgcagaatgccgccggagatatcgttagtctgcgtgatgtgattgagagtgataaaagcactctgctcggagaggccgttgccaaacgctttggcgaactgcctttcctgttcaaagtattatgcgcagcacagccactctccattcaggttcatccaaacaaacacaattctgaaatcggttttgccaaagaaaatgccgcaggtatcccgatggatgccgccgagcgtaactataaagatcctaaccacaagccggagctggtttttgcgctgacgcctttccttgcgatgaacgcgtttcgtgaattttccgagattgtctccctactccagccggtcgcaggtgcacatccggcgattgctcactttttacaacagcctgatgccgaacgtttaagcgaactgttcgccagcctgttgaatatgcagggtgaagaaaaatcccgcgcgctggcgattttaaaaagcgccctcgatagccagcagggtgaaccgtggcaaacgattcgtttaatttctgaattttacccggaagacagcggtctgttctccccgctattgctgaatgtggtgaaattgaaccctggcgaagcgatgttcctgttcgctgaaacaccgcacgcttacctgcaaggcgtggcgctggaagtgatggcaaactccgataacgtgctgcgtgcgggtctgacgcctaaatacattgatattccggaactggttgccaatgtgaaattcgaagccaaaccggctaaccagttgttgacccagccggtgaaacaaggtgcagaactggacttcccgattccagtggatgattttgccttcagcctgcatgaccttagtgataaagaaaccaccattagccagcagagtgccgccattttgttctgcgtcgaaggcgatgcaacgttgtggaaaggttctcagcagttacagcttaaaccgggtgaaagtgcgtttattgccgccaacgaaagtccggtgactgtcaaaggccacggccgtttagcgcgtgtttacaacaagctgtaagagcttactgaaaaaattaacatctcttgctaagcttattaaaggcttataacaccttcaggcggccagtccgcctgatttcattttatggataatcattatgaataaaagcctggtagcggtaggcgtcattgttgcgctaggcgtagtctggacaggcggcgcatggtatacaggcaagaagattgaaacccatctcgaagacatggtcgcgcaggcgaacgcgcaactcaaactgacagctcctgaatccaacctggaagtgagttatcaaaactatcatcgcggcgtattcagcagccagttgcaactgttggtgaaacccattgccgggaaagaaaatccgtggattaaaagcggtcagagcgtcatcttcaacgaaagcgttgatcatggtcccttcccgcttgcccagcttaaaaaactgaacctgatcccgagcatggcaagtattcaaaccacgctggttaataacgaagtaagcaaaccactgtttgatatggcaaaaggtgaaacgccttttgagattaacagccgcattggttacagcggtgattccagttccgatattagcctcaagccactgaattacgagcaaaaggatgaaaaagtcgcctttagcggcggcgagttccagttaaatgctgacagagacggcaaagccatctccctttccggggaggcgcaaagtggtcggatagacgcagttaacgaatacaaccagaaagtgcagttgacctttaataatctgaaaaccgacggttccagcacgctggcaagttttggtgagcgtgtaggaaatcaaaaactgagtctggaaaaaatgaccattagtgtggaaggcaaagaactggcactgctggaaggcatggagatcagcggtaaaagcgatctggtcaatgacggtaaaacgatcaatagccaactggattacagcctaaacagcctgaaggtacagaatcaggatctgggcagcggcaagctgactttaaaagtcggccagattgatggtgaagcctggcatcagtttagccagcaatataacgcgcaaactcaggcgctgctggcacagccagaaattgccaacaaccccgaactttatcaggagaaagtgacggaagccttctttagcgccctgccgctgatgctgaaaggcgatccggtgattactatcgcgccgctaagctggaaaaacagtcagggtgaaagtgccctgaatctgagcctgttcctgaaagatccggcaacgactaaagaagcgccgcaaacgctggcgcaggaagtagatcgtagcgttaaatctctggatgcgaaactgaccattccggtggatatggcaactgagtttatgactcaggtagcgaagctggaaggttatcaggaagatcaagcgaaaaaactggcgaaacagcaagttgaaggtgcaagtgcaatggggcagatgttccgtctgaccaccttgcaggacaataccatcaccaccagcctgcaatatgctaacggtcagataacgttaaatgggcagaaaatgagcttagaagattttgttggcatgtttgcgatgccagctcttaacgttccggctgtaccggcaattccgcagcagtaattcacggccaaaacgccggagaattttcactccggcgttttcatctgaaaacaaaccagagattgcctgatgcgctacgcttatcaggcctaccttttcctgcaacactttgaatttatgagtttttgtaggctggataaggcgtttacgccgcatccggcataaaaaacgcgcactttgtcaacaatctgaaacgccggagatttttctctccggcgttattttttacttcagcataaagtcatactgaatactcattttcacatcccagtaattcaggcgatcgcccagcgtactgccatcgcgcttttcccgccctttatcggcagcaagaaagaaattcatcccttgtaacggcccttcgctgacccgatagttcataccacctaagatacccgtgccttcaatccgcacatctcgtttactggattcatagccgcgagtcacaatcggtgcaaatgtcagcgtaaattgcggcgttaaacgatagttgacgcccaattgccaggactgcattccttcacggttacgatcaagacttaaactaaagggatagccaatgtcggtatccaccacggcaccattcattgcatggcgcaaataaccaccactgccaaatacacttccccacggcgcattccaggtcaattgtccactaaccaacgccgtttcattgggctggctggtattacgacttaaaccttcgagctgcgcgtaaaagccgagcaactcccctttcaacgtataattcgggtcgagcggtatgcttttctcgagaatactttgtatctgattggaaacatctttctgtacgcttgcccccagagaatagcgactggtatcatcatgccaactggcggctaaaaaagaacgtgcgcgatgtttatcgtattttcccgtctggctgttatacaccccttcatcacgaataccggttgtactatcagtccataaaaatactcgactacgccacattccccacagatcaatatttggtgttaaagcccaataacctaatgctccttcagaaactgtcggtaatgtacgttggctactgccagccattaacggaatacgataaggtaagctaccataactataatccgtcccgaagcgacctaatttaagcaggctattttcactgggttttatttttactgcccccagggcaaagccaaaacttttatcaccatcaagataccaccgggtactcatatcagcacgagcacctaatttataaacataatacgccccgccttcaacgccaataatattggaataataaccactattgaaatcgagcaatcctccctgtacccatgcgtaaatatctcttcccgcgccagcactgggcttatccgccctgcgcaattcgtttttcagtctgatgcgtagtcccgcttcatcgtcagccagttgcgccgcataagcagaggtaaggccagaggcagccgtcaggcaaataacggccatggccactatttttctcatagttgcacctttgatgttctgattatttttattgaatattaattagtgatatcgctgattaattgctgctgcacttttttacgattatcaatttcaaccacgatttctttgaattttttatccgtgagcggataaaaccagataataacgaatgccagtagcataaatccgcaaggtactaaggcaatacttgtgcggatgcccataataacttccggcgtttgcacctgattggcgatatatccgcttaaccccaaaataaaggcaggaatactacctccgattgcctgaccgcatttacgggtaaaactgaatagactataggtgagcccttcaattcgcacgccggtcaggtattcaccgtattctacggtatcagcttccagcgcccacatcacggtcatggtaacgccctgaccaatactagcgatggccaacgcaaccaacgccaccggcagactccagacggaaacccagaagaacagcagataaccgcaggttcccagcaaagcgccaatcaggaaggtattctttttaccgatcctcgcgaccatccccggcaccagcggtgcgcttgccacagtaccaaccaggttttgcaccagtaccagcacagtgaacagcccggtatcatttaacacatagcgcacgtagaacaagctgctggcgctgaccgcaaaggtgctaatcagcacacacagcgcaccgatgcacaacataaacagcgggcgattccgtttcagggtttgcagactgatattcaaactcggctgcgcaacgatacgtaccacattctcacgcgtgcttttgaagcagatgaagtaaagcaccattccggcaatcgccagcacaattgtccagaaatggtatacgctcaccatctcttccgggctggagttcttaatgctcggtcctatcagaaatgccaggcagacaaaggtcaaactagcggcaatcccacgagccgcgcccagacgggcgcgggattgtggttgttgggtcatcgcggtagcaagactaccataaggaatattcaccaggctgtagcaaagcccgaggcccatgtaggtcaaatatgcatacaccactttgctaccatggctccagtcggtcagcacccagaataccagcacgctgaagatcattaacggcgcagtaccgaagagtaaaaacgggcggaattttccccagcgggtattcacactgtccaccactcgtccggcaaagacgtcggcgaaggcatcgaatacccgcaccagtaacagcatggtgcccgccgcagcggcaccgacgccagcgacgtcggtgtagtaactcaacaggaagagcgcccccattgcgaaggcgaagttattggcgacgtcaccgaggctgtagccgacgatggtgcgccaggagagttgttgattcattgtttgcctccctgctgcggtttttcaccgaagttcatgccagtccagcgtttttgcagcagaaaagccgcgctcttcggtttgcggtcgcgagtgaagatccctttcttgttaccgccaacgcgcaatatgccttggctggtcgcaaaatcggcgaaattccatacctgttcaccgacgacggcgctgacgcgatcaaagacgcggtgatacatatccagccatgcacactgatactcttcactccacatgtcggtgtacatactgtgcagcccggctaacgtatccacgccgtattcggtgatgataatcggctgatgcagtttctcctgccaggccagaagttctttttccagtaccttctctgccgtttccaaatcgccgctttggacataccatccgtaataacggttcaggcacagcacatcaaagagatcgctgatggtatcggtgtgagcgtcgcagaacattacattgacgcaggtgatcggacgcgtcgggtcgagtttacgcgttgcttccgccagtggcgcgaaatattcccgtgcaccttgcggacgggtatccggttcgttggcaatactccacatcaccacgcttgggtggtttttgtcacgcgctatcagctctttaatcgcctgtaagtgcgcttgctgagtttccccgttgactgcctcttcgctgtacagttctttcggcttgttgcccgcttcgaaaccaatgcctaaagagaggttaaagccgacagcagcagtttcatcaatcaccacgatgccatgttcatctgcccagtcgagcatctcttcagcgtaagggtaatggctggtacggtaggagttggccccaatccagtccattaatgcgtggtcgtgcaccatcagcacgttatcgaatcctttgccacgcaagtccgcatcttcatgacgaccaaagccagtaaagtagaacggtttgtggttaatcaggaactgttcgcccttcactgccacactccggatgccgacgcgaagcgggtagatatcacactctgtctggcttttggctgtgacgcacagttcatagagataaccttcacccggttgccagaggtgcggattcaccacttgcaaagtcccgctagtgccttgtccagttgcaaccacctgttgatccgcatcacgcagttcaacgctgacatcaccattggccaccacctgccagtcaacagacgcgtggttacagtcttgcgcgacatgcgtcaccacggtgatatcgtccacccaggtgttcggcgtggtgtagagcattacgctgcgatggatcccggcatagttaaagaaatcatggaagtaagactgctttttcttgccgttttcgtcggtaatcaccattcccggcgggatagtctgccagttcagttcgttgttcacacaaacggtgatacgtacacttttcccggcaataacatacggcgtgacatcggcttcaaatggcgtatagccgccctgatgctccatcacttcctgattattgacccacactttgccgtaatgagtgaccgcatcgaaacgcagcacgatacgctggcctgcccaacctttcggtataaagacttcgcgctgataccagacgttgcccgcataattacgaatatctgcatcggcgaactgatcgttaaaactgcctggcacagcaattgcccggctttcttgtaacgcgctttcccaccaacgctgatcaattccacagttttcgcgatccagactgaatgcccacaggccgtcgagttttttgatttcacgggttggggtttctacaggacgtaacataagggactcctcattaagataataatactggtcaacctttaatctgattagttaaccaattctgtgttgcacacagttatctgtgagaaacccatggaagagaaatggaaataaaaagaactgacaccgcgatcaaaaaaccaaaaactgcaatacccacagcgtgatatagatcgcattaatctttaaaacagcgttgacagaagccataaaataagcaaccgaacgttcgttcgagcgtattgggaacgataaactctcatgacatatggctacagtgaatattttggggggaattctccgaagccgggaaggataatttttgcacagagaaattacgatatgaaacgcgggcacagttatcaccagcccgccgaaaaagagagagaatcaggatgcggttaagataccgccaatcatcgcgcgtaatccctgagcaaagctcgcttcacgcgccaggtcttccgcttcgatatcggccagtacaccgtaggtcagatccagcagtaaacgactagtcattgccgtgttgatgtctgggcttatctcgcctttttgctgggcatcacgcatccgctgggcaacaaattccgtgatcgtcatatgcttatttttaagcatggcggcgacctgtgggttacgcatcccttccgccataatttcaaccaccagcgcccgttgtccaaaggcttcatgggtgagagagacaatggactcgaccatatagtcaacgaaatgaatcccttcaatcggttcccggaaacgggccagcgccctctcctggtcctgtaagataatcgcctgaatcaaggcttctttggagatgaaatggtgatagagcgtcccgggactaatggcgcaagatttacagatggctttcatgctggcactgtgaaatccattttcactaaaaatctctctggcagcattgaggatccgggtccgtgtcggttgtgcttcagtctgcatgttatccatcattaaaccattatagttagcgtgaataactagtttaccgcgttgtcaggtgagcgcctatcattgctgttgaatagtgcgaaggcacactctattcgtatacttttcactctgaaattggttaaccaatagccgtgatttggctgccagttatttagcagagacgttgatgagtttatcccggtaaacaacacgcacggttgtttaccggtccgttagtgtattaattgagctcctgtaccccaccaccggagacggtgagaatttgtccgcttacccagctcgcagcagggctgcaaaggaacagcgctgcgttagcaatatcttgcggttggcccagacgtctgatcggcgtgtgctgtaacattttttgttcaatttctggtgtaataacggatttcagggcatcggttaatattgcccccggcgcaatgccatttacccgaatatttttttcacccaggtcaaacgccatatttctgaccagatgactggccgcagctttagaacttgcataggaagtcatgtttatatttttattttctgccgccatagaagtgatggtcagaataacgccaccgccatttttttccatttctggcgcaacaagttgactcagatggaaaaaagaaaacacattcagttcataagcacggcgaaaatccgccattggcatatcaaacggtttaggtccaccgccaccggcgttgttaaccagaatatcaactttacccagcttactgatagcaaagtctgccagtgcagagagttcctgttcggaagtaatatcacaacggcaggcaaatgcctgaccacccagttgttgaatttcgtctacaacatggttagctgcgtcggcgttaatatcactgaccaccacagatgcgccagctgtcgcgaatgtaatggcgatttctttaccaatacctgcacccgcacctgtgatgatggcgcattttccgtcgagtctcaggttgtcagaattaaacacataaacctcctgtgaacttcagtaaaaataaaaggcaccgcctgtgtgccacattttttatcattaaccttgaggaaaggacactaccaggtatagcagataaagagaggattatttcgctgcaatgagccgggcgggaataataagattgcgactatgcgtctcttcatgggtgattttttgcatcatgcgatccgcaagtgtgataccaagttcccgcgctggcgtgctggcccaggtaacaggtatatcatcaagtgtggttggtgtcgcatcggtaaatgccgccaggctaacctgttgctcaaagtaacgatcgactccgctttccccgctttgccgccctgctttgagcaaaccaaaccatgcccccatcgcaatagtttcgttatagcaaaccacggcactgatggtcgggttatgacgtaaaagcgccgtgatagcttccgcggcttgcttctggctggaagtgcactccaacacccaatcgctatgaaacggcaggccaaattttagtagagttgcacaatagcccccaacccgttctgcacgggttaaactggaactttgccctcccagccaggcgatccgctgatgcccattgcgaatgagatgctccgtcaacaactgtgcagcctgcatgttgtccgggcgaaccgtatcaacatcatcaagataactggcacgggaagcgaaaatcaccgggatagctttttcttctgccatccgtcgcaggtcatcgctacttcctgcagctccggcaattaccacaccatcgacaccctgattcagtaacagactaaaccgctgtgccagctgctcaccgtctttaccgccgtgaagcaaaaaaaccatccgtccctgcgcttccagagcttccgtcaatccggccgtcaattcggcgtaaaacggcgcagataaatcacggacgatcaaaccaatgacgccgctttgcccgccgcgcagcgcgctcgcctggcgattgcgcacaaatcccagctcttcaatggcggcgttaacgcgttctcctgtggcggtagagattcgccctttgccactaagcaccaggctaacggtacttacgctcacgcccgcagccagcgcaacatcatgaatggttatttttttggcggtagccatgcagatgacctactccctgattatgtgacagataaaacgttttaccttttatttatcttatacccgctattatcgttgcgtaatgtgatttatgcctcactaaaatttgataaaacgttttatcttctcgcgcaatttactgaatccagattgttctctacgaggagtcgttttatgacggcgaaaacagcaccgaaagtcacgctgtgggagttcttccagcagttaggcaaaaccttcatgttacccgtggcattattgagcttctgcggcattatgctcggcattggtagttctcttagcagccatgatgtcataaccctgatcccggtcctgggcaaccccgtgttgcaggctatctttacctggatgagtaagattggcagctttgcttttagtttcctgcctgtcatgttctgtatcgccatcccgctgggcctggcacgcgaaaataaaggcgtagcggcattcgctggcttcatcggttatgcggtaatgaacctcgcggtaaacttctggttgaccaataaaggcattctgccaaccacggatgccgcggttctgaaagccaataacatccagagcattcttgggatccagagcatcgataccgggatcctcggtgcggtgatcgccggtattatcgtctggatgctgcatgagcgtttccataatatccgcctgccggatgcgctggcattcttcggcggtacgcgcttcgtaccaattatctccagcctggtgatgggccttgtcggcctggtgattccattagtctggccgattttcgccatgggtattagcggcttgggccatatgataaacagcgcgggtgatttcggaccgatgctgtttggtaccggtgaacgtctgctgttgccgtttggtctgcatcacattctggtggcattaattcgctttaccgacgcaggcggcacgcaggaagtctgcggtcaaaccgtcagcggcgcactgaccatcttccaggcgcaattgagttgcccgaccactcacggtttttctgaaagcgccacgcgtttccttagccaaggtaaaatgcctgcgtttctcggcggtctgccaggtgcagcgttagctatgtatcactgcgcgcgcccggaaaatcgccataaaattaaaggtctgctgatttctggcctgatcgcctgcgtcgttggcggcactaccgaaccgctggaattcctgttcctgttcgtagcgccagttctgtatgtcatccacgcgctgttaaccggcctcggcttcaccgtcatgtctgtgctcggcgtcaccatcggtaataccgacggcaatatcatcgacttcgtggtgttcggtattttgcatggtctgagtaccaagtggtacatggtgccagtggtggcggcaatctggtttgtcgtttactacgtcatcttccgtttcgctatcacccgcttcaatctgaaaaccccggggcgcgatagcgaagttgccagcagtatcgaaaaagccgttgccggtgcgccgggtaaaagtggttacaacgttcctgcaatcctcgaagcattaggcggtgccgacaatattgtcagcctcgataactgcattacccgtctgcgtttgtctgtgaaagatatgagccttgttaatgtgcaggcactgaaggacaatcgggcaattggcgtagtacaacttaatcaacataacctgcaggttgttatcgggccacaagttcagagtgtaaaagatgaaatggccggtctgatgcatactgtccaggcataaggataagatatgttcgattttagtaaggtcgtggatcgtcatggcacatggtgtacacagtgggattatgtcgctgaccgtttcggcactgctgacctgttaccgttcacgattagtgacatggattttgccactgccccctgcattatcgaggcgctgaatcagcgcctgatgcacggcgtatttggctacagccgctggaaaaacgatgagtttctcgcggctattgcccactggttttccacccagcattacaccgccatcgattctcagacggtggtgtatggcccttctgtcatctatatggttagtaaactgattcgtcagtggtctgaaacaggtgaaggcgtggtgatccacacacccgcctatgacgcattttacaaggccattgaaggtaaccagcgcacagtaatgcccgttgctttagagaagcaggctgatggttggttttgcgatatgggcaagttggaagccgtgttggcgaaaccagaatgtaaaattatgctcctgtgtagcccacagaatcctaccgggaaagtgtggacgtgcgatgagctggagatcatggctgacctgtgcgagcgtcatggtgtgcgggttatttccgatgaaatccatatggatatggtttggggcgagcagccgcatattccctggagtaatgtggctcgcggagactgggcgttgctaacgagcggcagcaaaagtttcaatattcccgccctgaccggtgcttacgggattatagaaaatagcagtagccgcgatgcctatttaagcgcactgaaaggccgtgatgggctttcttcccctagcgtactggcgttaactgcccatatcgccgcctatcagcaaggcgcgccgtggctggatgccttacgcatctatctgaaagataacctgacgtatatcgcagataaaatgaacgccgcgtttcctgaactcaactggcagatcccacaatccacttatctggcatggcttgatttacgtccgttgaatattgacgacaacgcgttgcaaaaagcacttatcgaacaagaaaaagtcgcgatcatgccggggtatacctacggtgaagaaggtcgtggttttgtccgtctcaatgccggctgcccacgtagcaaactggaaaaaggtgtggctggattaattaacgccatccgcgctgttcgttaaccccaattgcgcaacgtaaaaaatcgttgcgcaatcgtggatttttaccctgctttgtttttataatggtgcgcacttttatatccagaaaaagagtgcgaccatgattgataccaccctgccattaactgatatccatcgccaccttgatggcaacattcgtccccagaccattcttgaacttggccgccagtataatatcagccttcctgcacaatccctggaaacactgattccccacgttcaggtcattgccaacgaacccgatctggtgagctttctgaccaaacttgactggggcgttaaagttctcgcctctcttgatgcctgtcgccgcgtggcatttgaaaacattgaagatgcagcccgtcacggcctgcactatgtcgagctgcgttttagtccaggctacatggcaatggcacatcagctgcctgtagcgggtgttgtcgaagcggtgatcgatggcgtacgtgaaggttgccgcacctttggtgtgcaggcgaagcttatcggcattatgagccggaccttcggcgaagccgcctgtcagcaagagctggaggcctttttagcccaccgtgaccagattaccgcacttgatttagccggtgatgaacttggtttcccgggaagtctgttcctttctcacttcaaccgcgcgcgtgatgcgggctggcatattaccgtccatgcaggcgaagctgccgggccggaaagcatctggcaggcgattcgtgaactgggtgcggagcgtattggacatggcgtaaaagccattgaagatcgggcgctgatggattttctcgccgagcaacaaattggtattgaatcctgtctgacctccaatattcagaccagcaccgtagcagagctggctgcacatccgctgaaaacgttccttgagcatggcattcgtgccagcattaacactgacgatcccggcgtacagggagtggatatcattcacgaatataccgttgccgcgccagctgctgggttatcccgcgagcaaatccgccaggcacagattaatggtctggaaatggctttcctcagcgctgaggaaaaacgcgcactgcgagaaaaagtcgccgcgaagtaacaaaatggatggtgcaaatgcaccatccatttttcatgcaaggcacaaagtcgcgcgatgtttggcggattcgatgcccagctcaatcaactccattacctggattgcctggcttgccggaaccggattttcaccatcgccatttaacgcatcacgaatagccgcatagtaagccggataattcccaggcaccgtcaacagcgtttcttcgacacgttcctcaccttccacgcgggtaagtacgccatcacgcatatcgtagccccagtcttcctgcggtagacgctcgccatttttcagacgttcttcctgtggatcgaggccatatttcacataactgcctcgggatccatgcacgatataccgtgcactctcagcggctgccagcatggtaccgtgtaaaatgactcgccgctgtggataggacaagatggcgtggaaataatcggtgctctgcgctccgggccgtaactgtgccaaatctaccgtcatgctgaccggtaaaccaaaaagcgtaatggcctgatcaagaagatgtggtgctaaatcgtaccagataccgctgcctgggccgccctgttcacgccaacgatcgcgcacctgcggacggaagcggtcaaaatgagactcaaagtaagcaacttcacccagcacgccttccgcgagtaaaccttttagcgtcaagaaatcgctatcccagcgacggttatggaatacagacagcacacgccccaggctttttgccagcgcatccagctctcgcgcttgactcagtgtcacggtaaagggtttatcaacgaccacatgtttacccgcctcaagcgccgctttggctaacgggaaatgggtatcgttgggtgtaggaatgacaatcaggtctatgttgggatcgttaaacagatgcttcggctcagagacaaccgtaaccgttggccagtcggcttttacttttgtttcatcactgctggagattaccgccagttcctgcccgggcgtgcccgcaatcaggggcgcatggaaggttttgctcgcataaccatacccaatcaacccaacacggatgttgtcgctcatgtcattgcctctcattgaagtatgatggctatttgacactatcctttacccacgctcaacagtttaataacctgccagcaataagggatgttgtttaacttaagtcaaaaaaatagcgaattttccaacgacaaaagctaaatatcgcaaaaacctcagtaaaaatcttgctggagctattattgctaagtaacatttaccccctgaagttaatggatcaatcaagagagatgtgggctgtaatgaatcgtcttattgaattaacaggttggatcgttcttgtcgttagtgtcattcttcttggcgtggcgagtcacattgacaactatcagccacctgaacagagtgctagcgtacaacacaagtaagctctgcacttgtggagcgacatgctgcccgtccgggtgcatgttttcacttgtcggatattaaaccaggaatttattatcttgttcgatgttgttggtgattgtcagggatagtaaagcgcgttactcttttcagagcagtttttcatccctgaatatttgccatcagcgcattcttattattgtaataacacaagcgttcacttttggtgaaattttatcatcactaataatacctacccctttggtattaattattttatggaccttttatgactgttcaggactacttattaaaatttcgcaaaatcagtagtctcgaaagtctggaaaaactctacgaccatcttaattacaccctgacggacgatcaggaactgatcaatatgtatcgtgctgccgatcaccgtcgcgcagagctggtttctggcgggcgtttgtttgacctcggccaggtaccgaagtccgtctggcactatgtccaataaagaaagtagcgatcggttataaaagccttataataacgcccctaaaattagatttgcctgtttgcgtcgctattctggagaacctatgaccaccacaacgccacaacgtattggaggctggttgcttggcccgttggcctggcttttagtcgctctgttgagtacgacgctggcgttgttgctgtataccgctgcgttatcttctccgcaaacatttcaaacgctcggcggacaagcactgacgacacaaatcttatggggcgtttcttttattaccgctatcgccttgtggtattacacactgtggttgaccatcgctttctttaaacgtcggcgttgtgttcctaaacactatattatctggctgcttatttccgtattgctggcagtaaaagcattcgcttttagtcccgtggaagatggcatagccgttcgccagttgctgtttactttgttggcaaccgcattgatcgtcccctatttcaaacgcagcagccgggtaaaagcgacgtttgtgaatccgtaataaccttacagttaacctgttgtcgcctgctctggattaacggataataggcggcttttttatttcaggccgaaaaatgactgactacctgttactgtttgtcggaactgtactggtcaataactttgtactggtcaagtttctcggtctctgtccgtttatgggggtttccaaaaaactggaaaccgcgatgggcatggggctggcaacaacgtttgtgatgacgctggcgtctatttgcgcctggcttatcgatacgtggattttgatcccacttaatctgatttacctgcgcaccctggcatttattctggtgattgctgtggtcgtgcagttcaccgagatggtggtgcgcaaaaccagcccggtgctttaccgtctgctggggatttttttgccgcttatcaccaccaactgtgcagtgctcggcgtggcgttgctgaatatcaatctcgggcacaatttcttgcagagcgcgctgtacggtttttccgccgctgtcggtttcagcctggtgatggtgctcttcgccgccatccgcgaacgccttgctgtggctgatgtcccggcaccttttcgcggtaatgccattgcgttaattaccgcaggtcttatgtctctggcctttatgggctttagtggtttggtgaagttgtaatgaatgctatctggattgccgttgccgccgtgagcctgctgggcctggcgtttggcgccattctgggttatgcctcccgccgttttgcggtggaagacgatccggtcgttgagaaaattgacgaaatcttaccgcagagccagtgtggtcagtgcggttatcccggctgtcgcccctacgcggaagccatcagctgtaacggtgaaaaaatcaaccgttgcgccccaggtggcgaagctgtgatgctaaaaattgccgagttgcttaatgtcgagccgcagccgctggatggcgaagcgcaagagataacgcctgcgcggatggtggcggttattgatgaaaataactgtattggctgcactaaatgtattcaggcgtgtccggtagacgccatcgttggcgctacccgtgccatgcatacggtaatgagtgatctctgtacgggctgcaatttatgtgttgatccgtgcccgacgcactgcatcagcttgcaaccggtcgcagaaacacctgactcctggaaatgggatctgaacaccattcccgtgcgtatcattcccgtggaacaccatgcttaagttattctctgcattcagaaaaaataaaatctgggatttcaacggcggcatccatccaccggagatgaaaacccagtccaacggtacacccctgcgccaggtacccctggcgcagcgttttgttattccactgaaacagcatattggcgctgaaggtgagttgtgcgttagcgtcggcgataaagtattgcgcggccagccgcttacccgtggtcgcggcaaaatgctgcctgttcacgcgcccaccagcggtaccgttacggctattgcgccccactctacggctcatcctagtgctttagctgaattaagcgtgattattgatgccgatggtgaagactgctggatcccgcgcgacggctgggccgattatcgcactcgcagtcgcgaagagttaatcgagcgcatacatcagtttggtgttgccgggctgggcggtgcaggattcccgacaggcgttaaattgcagggtggcggagataagattgaaacgttgattatcaacgcggctgagtgcgagccgtacattaccgccgatgaccgtttgatgcaggattgcgcggctcaggtcgtagagggtattcgcattcttgcgcatattctgcagccacgcgaaattcttatcggcattgaagataacaaaccgcaggcgatttccatgctgcgcgcggtgctggcggactctaacgatatttctctgcgggtgattccaaccaaatatccttctggcggtgctaaacaattaacctacattctgaccgggaagcaggttccacatggcgggcgtagttccgatatcggcgtattaatgcaaaacgtcggcactgcttatgcagtgaaacgtgccgttattgatggcgagccgattaccgagcgtgttgtaaccctgactggcgaagcaatcgctcgcccgggcaacgtctgggcacggctggggacgccagtgcgtcatttattgaatgatgccggattctgcccctctgccgatcaaatggtgattatgggtggcccgctaatgggctttaccttgccatggctggatgtcccggtcgtaaagattaccaactgtctgttggctccctctgccaatgaacttggcgaaccacaggaagaacaaagctgcatccggtgtagcgcctgtgctgacgcctgccctgcggatcttttgccgcaacagttgtactggttcagcaaaggtcagcaacacgataaagctaccacgcataacattgctgattgcattgaatgtggggcttgcgcgtgggtttgcccgagcaatattcccctggtgcaatatttccgtcaggaaaaagctgaaattgcggctattcgtcaggaagaaaagcgcgccgcagaagccaaagcgcgtttcgaagcgcgccaggctcgtctggagcgcgaaaaagcggctcgccttgaacgacataagagcgcagccgttcaacctgcagccaaagataaagatgcgattgctgccgctctggcgcgggtgaaagagaaacaggcccaggctacacagcctattgtgattaaagcgggcgaacgcccggataacagtgcaattattgcagcacgggaagcccgtaaagcgcaagccagagcgaaacaggcagaactgcagcaaactaacgacgcagcaaccgttgctgatccacgtaaaactgccgttgaagcagctatcgcccgcgccaaagcgcgcaagctggaacagcaacaggctaatgcggaaccagaacaacaggtcgatccgcgcaaagccgccgtcgaagccgctattgcccgtgccaaagcgcgcaagctggaacagcaacaggctaatgcggaaccagaagaacaggtcgatccgcgcaaagccgccgtcgaagccgctattgcccgtgccaaagcacgcaagctggaacagcaacaggctaatgccgagccagaacaacaggtcgatccgcgcaaagccgccgtcgaagccgctattgcccgagccaaagcgcgcaaacgggaacagcaaccggctaatgcggagccagaagaacaggttgatccgcgcaaagctgccgtcgaagcggctattgcacgcgccaaagcacgcaagctggaacagcaacaggctaatgcggtaccagaagaacaggttgatccgcgcaaagcggcagttgccgcggctattgcccgcgctcaggccaaaaaagccgcccagcagaaggttgtaaacgaggactaaatggtattcagaatagctagctccccttatacccataaccagcgccagacaagccgcattatgctgttggtgttgctcgcagccgtgccaggaatcgcagcgcaactgtggttttttggttggggtactctcgttcagatcctgttggcaagcgttagtgctctgttagccgaagctctcgtactcaaactacgcaagcagagcgtagccgcagcgttgaaagataacagtgcattgctgacaggcttattgctggcggtaagtattccccccctcgcgccatggtggatggtcgtgctgggtacggtgtttgcggtgatcatcgctaaacagttgtatggcggtctgggacaaaacccgtttaatccggcaatgattggttatgtggtcttactgatctccttccccgtgcagatgaccagctggttaccgccacatgaaattgcggtcaacatccctggttttatcgacgccatccaggttatttttagcggtcataccgccagtggtggtgatatgaacacactacgcttaggtattgatggcattagtcaggcgacaccgctggatacatttaaaacctctgtccgtgccggtcatagcgttgaacagattatgcaatatccgatctacagcggtattctggcgggcgctggttggcaatgggtaaatctcgcctggctggctggcggcgtatggttgctatggcagaaagcgattcgctggcatattcccctcagcttcttagtaacgctggcgttatgcgcaatgttgggctggttgttcagtccagaaacactggcagcaccgcaaattcatctgctgtctggagcgaccatgctcggcgcattctttattttgactgacccggttaccgcttctacgaccaatcgtggtcgtcttattttcggcgcgcttgcgggcttattagtctggttgatccgcagtttcggcggctatcctgacggcgtggcttttgccgtcctgctggcgaacatcacggttcctctgatcgattactacacgcgtccgcgcgtctacggccatcgcaaagggtaaaccatgctgaaaactatccgaaaacacggcattacgttggcgctatttgcagcgggtagtacagggttaactgcggccatcaaccagatgaccaaaacgacgattgctgaacaggccagtctgcaacaaaaggcgttatttgatcaggtgctgccagccgaacgctataacaatgcgctggcacagagttgctatctggtaactgcgccagagttaggtaaaggtgagcatcgggtttacatcgccaaacaggatgacaaaccggcagccgccgttctggaagcaaccgcgccagatggctattccggtgcgattcagctgctggtgggagccgattttaacggcacggtacttggcacgcgcgtgacagagcaccacgaaacgccagggcttggcgataaaatcgaactgcgcctttctgactggatcacccattttgcgggtaaaaaaatcagtggtgcagatgatgcgcactgggcggtgaagaaagatggtggtgatttcgaccagttcaccggcgcgacgattactccccgcgcggtggttaatgcggtaaaacgcgccggattgtacgctcagacgttaccggcacaactttctcaacttcctgcctgtggagaataaagcgtgagcgaaattaaagacgttattgttcaggggttgtggaaaaacaactctgcgctggtccagttgctcggcctttgtcctctgttggcggtcacgtccactgccactaacgctctgggtttaggacttgcgactacgctggtactgacgctgaccaacctgaccattagcacgctgcgtcactggacgccagccgagatccgcattcccatttacgtgatgatcatcgccagcgtggtcagcgctgtacagatgctgatcaacgcctacgcctttggcctgtatcaaagtttagggatttttattccgctgattgtcactaactgtatcgttgtgggccgcgctgaagccttcgccgccaaaaaaggtccggcgcttagcgcactggacggctttagtattggtatgggcgcaacctgcgccatgttcgtgctgggtagtctacgcgaaattatcggcaatggcacattgtttgacggtgcagatgcgctgttaggtagctgggcaaaagtattacgcgtggagattttccacaccgactcccctttcctgctggcgatgctgccaccaggtgcatttattggcctgggactgatgctggcaggaaaatacctgattgatgaaagaatgaaaaagcgccgtgctgaagcagctgcagaacgtgcattgccaaacggtgaaacagggaatgtctgatgaataaagcaaaacgcctggagatcctcactcgcctgcgtgagaacaatcctcatcccaccaccgagcttaatttcagtagcccttttgaattgctgattgccgtactgctttccgctcaggcgaccgatgtcagtgttaataaggcgacggcgaaactctacccggtggcgaatacgcctgcagcgatgcttgaactgggcgttgaaggggtgaaaacctatatcaaaacgattgggctttataacagcaaagcagaaaatatcatcaaaacctgccgtatcttgctggagcagcataatggcgaggttccggaagatcgtgctgcgcttgaagccctgcccggcgtaggtcgtaaaacagccaacgtcgtattaaacactgcattcggctggccgactattgctgtcgacacgcacattttccgcgtttgtaatcgtactcaatttgcgccggggaaaaacgtcgaacaggtagaagaaaagctactgaaagtggttccagcagagtttaaagtcgactgccaccattggttgatcctgcacgggcgttatacctgcattgcccgcaagccccgctgtggctcttgtattattgaagatctttgtgaatacaaagagaaagttgacatctgaagaaaaggggtaacaccgattaccccattgataacctttctttatcctcttttaaaacatctttttaacgtcaatgatgccattgcttagcgttatcatcaggtaatccgtttgcggataaccaaaaatgcaggttaattgtttttttaatagcgaaattttctattcattcgtgatcaagatcacgatgctgtcgcaatgtaaaaacattgcaagaatcaggttaaaatcatttaaatttacacacgcaacaaatattgacctacaaaacattacactggctatttttcagaaactggactatctcactagtaaaaacgctaaatagcagaacatatcgccgttaagccatcacccccctctcagtgcagtgaaaaaatctgccgttacgttttttgaaaaatttaacgctggataacatttcccggaatggttgaattccccgcctcagttatatgtaacagattattacaaaggacttgtctgaaagtgcaagatagtgaacattacctgccgtttcccctcccactataacaattgcgcgtatgttttttatacataacgcgagaaagcacccccgttaatatgggatgtaaaaaaagaggtaaaagtgtccactgcaaaccaaaaaccaactgaaagcgtcagtttgaacgctttcaaacaaccgaaggcgttctatctcatcttcagcattgagttatgggaacgttttggttattacggcctacaaggaattatggctgtttacctggttaaacaactgggtatgtctgaagcggatagtatcacccttttctcttcctttagtgccctggtttatggtctggtcgctatcggcggctggttaggtgacaaggtactgggtactaaacgcgtaattatgctcggcgctattgtgctggcgattggttatgctctggttgcctggtctggtcacgacgccggtatcgtttatatgggtatggcggctattgcggtcggtaacggcctgtttaaagctaacccgtcttctctgctttctacatgctatgagaaaaacgacccgcgtctggacggtgcattcaccatgtactacatgtccgtcaacatcggctctttcttctctatgattgctacgccgtggctggccgcgaaatacggctggagtgttgcgtttgcgttgagcgttgtaggcctgctgatcactatcgttaacttcgccttctgccaacgctgggttaaacagtacggtagtaaaccagacttcgagcctatcaactaccgtaacctgctgctgaccattattggtgttgtggcactgatcgctatcgccacctggctgctgcacaatcaggaagttgcgcgtatggcgctgggcgttgttgccttcggtatcgtggttatcttcggtaaagaagccttcgcgatgaaaggtgctgcgcgtcgtaaaatgatcgttgccttcatcctgatgctcgaagccattatcttcttcgtgctgtacagccagatgccaacgagtctgaacttctttgcgattcgtaacgttgagcactccattctgggtctggccgtagaacctgagcagtatcaggcactgaacccgttctggatcatcatcggtagtccgattctggccgctatctataacaagatgggcgataccctgccgatgccaaccaagtttgcaatcggcatggtgatgtgttctggtgcgttcctgattctgccgctgggtgcgaaattcgcgtctgacgctggtatcgtgtctgtaagctggctggtcgcaagctatggcctgcagagcatcggggaactgatgatctctggtctgggtctggcaatggttgctcaactcgttccgcagcgtctgatgggcttcattatgggtagctggttcctgaccactgccggtgcaaacctgattggtggttatgttgcgggtatgatggctgtgccggataacgttaccgatccgctgatgagtctggaagtctatggtcgcgtattcttgcagattggtgtcgctactgccgttattgcagtactgatgctgctgaccgcgccgaaactgcaccgcatgacgcaggatgacgctgcagacaaagcggcgaaagcagccgtagcgtaaaattcagggaaactcttttacaagccgctaacttttcgttagcggctttttttttgttcagcaacgcactaccatactttaaaccacagacaaaaggagttaccgatgaaattgttctacaaaccgggtgcctgctctctcgcttcccatatcaccctgcgtgagagcggaaaggattttaccctcgtcagtgtggatttaatgaaaaaacgtctcgaaaacggtgacgattactttgccgttaaccctaaggggcaggtgcctgcattgctgctggatgacggtactttgctgacggaaggcgtagcgattatgcagtatcttgccgacagcgtccccgaccgccagttgctggcaccggtaaacagtatttcccgctataaaaccatcgaatggctgaattacatcgccaccgagctgcataaaggtttcacacctctgtttcgccctgatacaccggaagagtacaaaccgacagttcgcgcgcagctggagaagaagctgcaatatgtgaacgaggcactgaaggatgagcactggatctgcgggcaaagatttacaattgctgatgcctatctgtttacggttctgcgctgggcatacgcggtgaaactgaatctggaagggttagagcacattgcagcatttatgcaacgtatggctgaacgtccggaagtacaagacgcgctgagtgcggaaggcttaaagtaatagccatcggcccacaggtcgttgtgggccgaaatgagatatttcagagctttgttgcgctgaagtaatgttctggtttggcaatacgatcctgagcagccaccacttgcagctcatattcctgcattgctttggtggtcaccatgatttcgtagactgcagcggtcacatgttccagcgcctcctgcagcgttgccccctgaagcagtttcaccagcagtaaaccgctcgtcacatcaccaacacctaccggctggcgcataccaaaatccaccagcggacggctgatatgccaggcttcatcggcggtgaccagcagcatttcaaaacggtcacggctgtagccagctcgcgccaggtgtttaaccaacacaatttgtggcccttgcgcaatgagttcgcgcgctgccagaaccgcttcttcgacgttatttaccgcatgctcacagagtatttccagctcaaccagatttggcgcaatgatatcgctggcaggcaaaccgtgccgcacatgaaactctgcgacacccggtgcaacgatacagcctttttccggatgacccattaccggatcgcaaaaatatttcgcctgcggattcgcggctttcacctgacggacgataccgaggatatgttcaccctgctccgcgcttcccagatagccacttaatacggcatcacaggtgtgtaatttatcaatggcggcaatgccttgcacaatttcggttaaatggctgggcggcatcacgcagccagtccatttgccgtattgggtgtgattagaaaattgaacggtgttcagcggccagacgttcgcgcccaggcggcgcatcggaaactctgccgcactgttacccgcatgaccataaacaacgtgagactggatagcgagaatatttttcatcatgttccctgtataaaaaccagggggagtgatttctcactccccctttccacttaatgcattatttccagcaaatcagacagtaattctttttaccgcgacgcagtaaggtaaaacgaccaaacagacgatcttcttctttaaagaagtattcaggatcggactgtttttcaccgttaatggtgatggcattggaggcgatagttttacgtgcctgaccacgggaaggttgcagttcagaatcgaccagtgcctgcatcaggtctgcgcccttttccatctcaaccatcggtacgccgtcctgcgccagctgttcgaagtccgcttcactcagcgcactcaaagaaccgctgaacaggcattcggtaatacgttttgccgcctgtaaaccttcttcaccgtgaaccagacgagtcacctgctccgccagtacatactgggcgcgcggtgctttaccgctgtttttatcttcttcttccagggcgttgatctcttcaatgctcataaaggtgaagaacttcaggaagcggtaaacgtcggcatccgcagtgttgatccagaactggtagaatttgtacgggctggttttcttcggatccaaccagactgcgccgccttcagttttaccaaatttggtgccatctgctttagtgatcagcggaacggtcaggccaaacacctgattctgatgcagacgacgggtcaggtcgataccagaagtgatgttaccccactggtcagaaccaccaatttgcagcaccacaccgtactgtttgttcagacaggcgaagtcataaccctgcaacaggttgtaggaaaactcagtgaagctaatcccctgatcttcacggttgagacgctgcttaaccgcttctttgttgatcatctggttaacggagaagtgtttgccaatatcgcgcaggaaggtcagcacattcatattgccgaaccagtcatagttgttcgccgcgatagcagagttttctccacagtcgaaatcgaggaacggggcaacctgcttacggattttgtccacccactcctgaacagtttcttcggtgttcagcttacgctcggcagctttgaagctcgggtcgccaatcagacccgtcgcgccgcctaccagcgcaaccggcttgtggcccgcctgctggaagcgtttcaggcataacaatggaacaagatgccccaaatgcaagctgtcagcggtaggatcgaagccgcaatagagcgcgatcgggccttgcgccagtcgctctgctaacgcttcctcgtccgtcacctgggctaccagcccccgctcttgcaattgtttaatcaagttactgcttgccatcaaaatctccatgtatataacgactgcacctttgccggtacacgacttttcgccagatgcgaaagagacatagaataaagtgccagaatcaggagtaccagcgattaaagcaagatttttgcatcttttcagggtgcaagacgatcaatcttccacgcatcattttcacgctggtacaaaaagcggtcatgcaggcgatgctcaccaccctgccagaactcaatctgttcaaggctgacgcgaaaaccgccccaaaagctcggcaatggcacttcgccctgttgaaacttctgcttcagctccaggaatttactttcaaggataccgcgggcagaaatgcgactggactgcttgctaacccatgcaccaatctggctatcacgcgggcggctatgaaaatatttcatcacttcgagagtgctaagtcgttctgctttaccgatcaccatcacctggcgctcaagggtatgccacgggaacagcaggctaacgcgcggattattttcgatttgatgtgctttacggctgccgaggttggtgtaaaacaccatgcctttttcgtcgtaatgtttgagtaaaacgatgcgctgataaggctgaccatgttcatccacggtagcgaccaccatcgcggtagggtccgccagtttggcttcacaagcctgagagagccaacgttcaaaaagggttaatggatcggcgggaagatcgcggcggcgtaacccgcctttggtgtattcacggcgcagatgcgcgatttgctgcaattcgtcgttatcagacatggttttctttacggattgtcagtgggtgacgctattgtgcgccgcccctggaaaaatctcaacgctgtggattttgtaactgacagttattcaagacgatgcggtcgcgtttatagacagtcgcttcatcgcctttgctccagaaaacatagattccgtcagtgtaacgcgcgccagaggcactaatgccctgtttgagatgcagtagttgattatcgtaaacaaaactgacctcctggcgcggattattcagtttgaccgtcaacggtttttcatcacactggtattccagcgtatcggtttgcatgcgctcaaccagctgattaaaggcgctacagccggagagaaggaccggcaaaatgataattaacagttttttcatagtcatatcccgaagactttcctggtctggagggcaatacgccctccctaacgttccaagtgtaacggcagacgcggtaagaaaaattcagttaactctgatatcacgggttagcggggaaaatagcccccagtaccgtctcctggcttgcgccagtgacggaaggcagatttcctggtaatcccgccagcgtccgccaggcaagccaggcgaaagccaatgcttccatgtcatcgccactaatgccaacggcatcggtggtggtgacttctgtgcctggcagtaatgccgccagacgcgccatgagtagcggattacgactacctccaccacataccatcaatcgttcgcagccaccgctcaacaaaacttgttcagaaatggtcacggcggtgagttctgccagtgtcgcctgcacatctcggggatcaacacccggaaaatggcgcaaatggcgctccagccaaccatagttaaagtattcgcgtccggtgcttttcggtgcaggttggctgaaatacgggtcgctgagcatattttgcagcagtgggagaataactttacccgcccgtgcccactcggcatctttatcgtaaggtttaccggcctgacgccagatccaggcatccatcagcatgttaccaggaccggtatcgtagcccccaaccggctgcccaggaatgagcagactcagattggcgatgccgccaatattgagcaccattcgtcgctcggttgggtgagccagcagcgcatgatggaacgcaggtaccagcggtgcgccttgtcctcccaaggcaatatcgcgacggcgaaaatcaccgacaaccgtaattccggtgcgtgccacaatttgattgttatcgccaatctgtaaagtgtgtggtgccacgcccgtcggttcatgccagacggtttgaccgtgacaaccgatcgcaactatatctcttgcctgcagattttgttccttaagcaaggcattgaccgcatcagcaaaaagttgcccgagttgagtatcaagctgtccaaactggctaagtgtaagctgctggccctggcaaatatccagtacagcctgtttcagagataccgggatcggccaactcaaacttgccagctgtgcgacccggtgttcatcaattgtcgccaacacaacatcaacaccatcaaggctggtgccactcataacgccaataaagcggccgcttttcatagttcatcctttttcaatctgacgtttgcgcaccactcaaacataaacttttcgtgaataccatgcggaatgaccgatttttaccgttggtagtaaaacattatcttcaaatcaataatcatcatgaatgttttgtttataattggttgatcctactttcattatgatttgctcatatttggtagaacatgtaaccatggattcacatatgccatatactttgaccatgagggatgcttgcgtggcgtttcatggtgaacaggagatttttcaatgattaaacgcgtattggttgttagtatggtaggtctgtctcttgtcggttgtgttaataacgacaccctgagtggggatgtttataccgcttctgaagcgaaacaagtacagaatgtcagctatggcaccatcgttaacgtacgtccggtacagattcagggcggtgatgattccaacgttatcggtgcaattggcggtgctgttcttggtggtttcctggggaatactgttggtggcggaaccgggcgttctctggctactgcagcaggcgctgttgcaggtggcgtagctggtcagggcgtacagagtgcaatgaacaaaacgcagggtgtcgagctggaaattcgtaaagacgatggtaataccatcatggtggtacagaaacaaggcaacactcgtttctctccgggccaacgtgtcgtactggccagcaatggcagtcaggtgaccgtttctccgcgctaaataagtttgcgtgtggtcaggttactgaccacacgcccccttcatttcaccctttggcctgtaactcaatgatattatgctcaagttttgcgatgagcgtaatcagttgctccagttcctctgcggagatgccatgtaatatttccgcgcgggttttgttaataacagcttccatttcgctgatcagcggctctgccttttccgtcagtttaatacgtttagcccgacgatcgctggcacaagtttgacggctaattaaccctttttcttccagttggtccagagtacggaccagacttggctgctcgatgccaatcgcttttgccagttgaatttggctctggtctggaggtaactgatggatattgtgtaacgtaacccaatgggtttgtgttaactccagcggtttcaggcgatggtctatcagagcacgccatatgcgcaccaaccgtgccagatcagaacctagtgggctttccaatttcatctccttataattagcttgctaagatattatgcggcttttagaatagtgtgcagcaattgtattgctaaaacaaatgtattgctgcatttggttaccgtcagacatatttttcagaaattgcgcgtaaatttttcgcacttaaagaatatttattaatctaacgcaatatattcggtcgtaaaggaatctactttgtgaagtttatgctcaatgcaacaggattgcccttacaagatctggtgttcggtgcgtccgtctactttcctccgtttttcaaagcattcgcgtttggattcgtcatctggcttgtcgtacaccgcctgcttcgtggctggatctacgccggtgacatctggcatcccttgttaatggatttaagcctgtttgcgatttgcgtttgccttgctctggcaatactgattgcgtggtaactatgagtattaaaacaattaagtatttcagtacaatcattgtagcggtagttgcggttcttgccggatggtggctgtggaattattacatgcaatctccgtggacacgcgacgggaaaatacgcgcagaacaggtttctatcaccccacaggtgagcggacgtattgttgagctgaatataaaagacaaccagctggttaacgcgggggatcttctgctcacgatcgataaaacgccctttcagatcgccgagctgaacgcacaggctcagctggcgaaagcgcaatctgacctcgcaaaagccaataacgaagcgaatcgtcgtcgtcatctcagtcaaaattttatttctgccgaagaactcgataccgctaacctcaatgttaaagcgatgcaggccagtgttgatgccgcacaggcgacgctgaaacaggcacaatggcaactggcgcaaacggaaattcgcgccccggtgagtggatgggtgactaaccttactacccgcatcggcgattacgctgataccgggaaaccgctgtttgcccttgtcgacagccacagcttttacgtcattggttattttgaagaaaccaagttgcgccatatccgcgaaggtgcaccagcacaaattaccctctatagtgataacaaaacgttacagggtcacgtttccagtatcggtcgggcgatttatgatcagagcgttgaaagtgacagtagccttattccggatgttaaacctaacgtcccctgggttcgactcgcccaacgcgttcccgtccgctttgcgctggataaagtcccaggcgatgtcacgttggtgagcggcaccacctgtagcattgccgtaggtcaataatgaacgcaagcagttggtccttgcgcaatttgccctggttcagggccacgctggcgcaatggcgttatgcgttacgcaataccattgccatgtgtctggcgctgacggttgcctattatttaaatctggatgaaccctattgggcgatgaccagcgctgcagtggttagctttcccaccgttggcggtgttatcagcaaaagcctcggacgcatcgctggcagtttgctcggagccattgcggcactgcttcttgccgggcatacgctcaatgagccgtggttttttctattgagcatgagcgcgtggcttggcttttgtacctgggcctgtgcgcacttcacgaataacgtcgcgtatgcatttcaactggcgggctacacggctgccatcatcgcctttccgatggttaatattactgaggccagccagctgtgggatatcgctcaggcgcgcgtttgcgaggtaatagtcggtattttgtgcggcggcatgatgatgatgatcctgccgagcagttccgatgctactgcccttttaaccgcattgaaaaacatgcacgcccgattactggaacatgccagtttactctggcagcctgaaacaaccgatgccattcgtgcagcacatgaaggggtgattgggcagatactgaccatgaatttgctgcgtatccaggctttctggagccactatcgttttcgccagcaaaacgcgcgccttaatgcgctgctccaccagcaattacgtatgaccagtgtcatctccagcctgcgacgtatgttgctcaactggcccagtccgccaggtgccacacgagaaattctcgaacagttgctgacggcgctcgccagtagccaaacagatgtttacaccgtcgcacgtattatcgccccgctacgcccgaccaacgtcgccgactatcggcacgtcgccttctggcagcgactacgttatttttgccgcctttatctgcaaagtagtcaggaattacatcgtctgcaaagcggtgtagatgatcataccagactcccacggacatccggcctggctcgtcataccgataacgccgaagctatgtggagcgggctgcgtacattttgtacgttgatgatgattggcgcatggagtattgctagccaatgggatgccggtgccaatgcattaacgctggcagcaattagctgcgtactctactccgccgtcgcagcaccgtttaagagcttgagtcttctgatgcgcacgctggtgttacttagcctattcagctttgtggtcaaatttggtctgatggtccagattagcgatctgtggcaatttttactgtttctctttccactgctggcgacaatgcagcttcttaaattgcagatgccaaaatttgccgcattgtgggggcaactgattgtttttatgggttcttttatcgctgtcactaatcccccggtgtatgattttgctgattttcttaacgataatctggcaaaaatcgttggcgtcgcgttggcgtggttagcgttcgccattctgcgtccaggaagcgatgctcgtaaaagccgccgccatattcgcgcgctgcgccgggattttgtcgatcagctaagccgccatccaacactgagtgaaagcgaatttgaaagcctcacttatcatcacgtcagtcagttgagtaacagccaggatgcgctggctcgccgttggttattacgctggggtgtagtgctgctgaactgttctcatgttgtctggcaattgcgcgactgggaaagccgttccgatccgttaagccgagtacgggataactgtattagtctgttgcggggagtgatgagtgagcgtggcgttcagcaaaaaagtctggcggccacacttgaagaattacagcggatttgcgacagccttgcccgtcatcatcaacctgccgcccgtgagctggcggcaattgtctggcggctgtactgcagccttagccaacttgagcaagcaccaccgcaaggtacgctggcctcttaattacttaattacaccacaggcatagcgttcaccgccaccgcccagcggtttaggttgatcggacatattatcgccgccaacgtggaccatcagcgctttgtctttgatttcatccagacttttcagacgaggcgcgatgacggcatcggtagctttgccgtcattattgacgaccagtgcaggcagatcgcctaaatgcccggcaccttctggcccttcatgtttaccggtattttgtggatcaagatgcccgcctgcggattccgcggcgctggctttgccatctttggtggctggctggcagcttcctttggcatgaatatggaagccatgttcaccggggggtaatgctttcagatcggggctaaactccagacctttatcggtttcagtaatggtgacgctaccaatactctgccctaccccttggctcgtgacgaggttcatctcgactttttcactggcagcttgtgcgccggttgcaacaaccagcgccagaatagccagactaaaacgtttcataggacctccgttcattgtgcattcctgaataagtgtaaaccagtgacacatttttgaacggcggctattcctaaaagtgcttacggtacgtcgtaccccagtgccgctttacggatacgaaaccattgttgacgggtcattttcagtgtttctgcttcgacagctgcccgtacgcgctcaattttaccactaccgataattggcagcggctggcttggtaaacgtaatacccaggcgtaaaccacctgttcaatgctgcccgcgtttaactcctctgccaccacagccagttcatcacgcagcggctggaaataatcatcattaaacagacgaccaccaccaaggcaggaccacgccatcggacgaacacgcagttgttgtagttggtcgagcgtgccatccagcagtaacggctgatgcaccggggatatttccacctgattagtggcaagggtaaacggcagacgactttgcaacagggcaaattgcgcaggcgtaaagttgcttacgccaaaatgacgcactttgccgctctgatgcagatgtttgaacgcgtccgccacttcatcggcatccattaacgggtctggtcggtggattaacagcaaatccagatgatcggtcgcgagattaattaggctctgttcggcgctcttaatgatgtgatcgcggtcagtgatgtaatgaccaatgacgttttcttcacgcgcggtcgtcgcgataccgcatttactgacgatttccatccgttcacgcaggtgaggtgccagtttcagtgcctcgccaaacgccgcttcgcactgatagccaccataaatatcagcatggtccacggtggtcacgccgagatccagatgctcttcaataaaactgaccagctggcgggcggacatattccagtccatcaatcgccagtagcccatcacaaaacgggaaaactccgggccttgcggcgcaatagtaatacgctgaaccataatcgcttcctcttatcagatatgagaggagtatacgcaagattaggttcaaaagagacttggttgctccggttcgtcactactcgctggcttatttgcgcgtaatttgcgcattaatcgctgccgacaaaggcgcagcacctcttgtttttcgccatcgctcattttattccagttaaaacgctcatcacgactacgaaaacagccgcgacaaaacccgcgttcgtcagactggcaaattccccggcacgggctctggacgggaaagaactctaattgctccgccacttcgccctcctcagataagattattaccattattgaagctgttaatgtccaaagtagcaactttgcttgcactagaccgactggtctactacactccaacgcatgaacaaacacaccgaacatgatactcgcgaacatctcctggcgacgggcgagcaactttgcctgcaacgtggattcaccgggatggggctaagcgaattactaaaaaccgctgaagtgccgaaagggtccttctatcactactttcgctctaaagaagcgtttggcgttgccatgcttgagcgtcattacgccgcatatcaccagcgactgactgagttgctgcaatccggcgaaggtaactaccgcgaccgcatactggcttattaccagcaaacactgaaccagttttgccaacatggaaccatcagtggttgcctgacagtaaaactctctgccgaagtgtgcgatctgagtgaagatatgcgcagcgcgatggataaaggtgctcgcggcgtgatcgccctgctctctcaggcgctggaaaatggccgtgagaaccattgtttaaccttttgtggcgaaccgctgcaacaggcacaagtgctttacgcactgtggcttggcgcgaatctgcaggccaaaattagccgcagtttcgagccactggaaaacgcgctggcccatgtaaaaaacattattgcgacgcctgccgtttaacaggcattttttatcaccagacgaccgggagcctttatgagttctgaaaaactgtattccccactgaaagtgggcgcgatcacggcggcaaaccgtatttttatggcaccgctgacgcgtctgcgcagtattgaaccgggtgacattcctaccccgttgatggcggaatactatcgccaacgtgccagtgccggtttgattattagtgaagccacgcaaatttctgcccaggcaaaaggatatgcaggtgcgcctggcatccatagtccggagcaaattgccgcatggaaaaaaatcaccgctggcgttcatgctgaaaatggtcatatggccgtgcagctgtggcacaccggacgcatttctcacgccagcctgcaacctggcggtcaggcaccggtagcgcctagtgcacttagcgcgggaacacgtacttctctgcgcgatgaaaatggtcaggcgatccgtgttgaaacatccatgccgcgtgcgcttgaactggaagagattccaggtatcgtcaatgatttccgtcaggccattgctaacgcgcgtgaagccggttttgatctggtagagctccactctgctcacggttatttgctgcatcagttcctttctccttctagtaaccatcgtaccgatcagtacggcggcagcgtggaaaatcgcgcacgtttggtactggaagtggtcgatgccgggattgaagaatggggtgccgatcgcattggcattcgcgttagtccaatcggtactttccagaacacagataacggcccgaatgaagaagccgatgcactgtatctgattgaacaactgggtaaacgcggcattgcttatctgcatatgagtgaaccagattgggcggggggtgaaccgtatactgatgcgttccgcgaaaaagtacgcgcccgtttccacggtccgattatcggcgcaggtgcatacacagtagaaaaagctgaaacgctgatcggcaaagggttaattgatgcggtggcatttggtcgtgactggattgcgaacccggatctggtcgcccgcttgcagcgcaaagctgagcttaacccacagcgtgccgaaagtttctacggtggcggcgcggaaggctataccgattacccgacgttgtaatccaacattgcgagcggcgtaaagccgccgctatactaaaacaacattttgaatctgttagccattttgaggataaaaagatgcgtcttcttcataccatgctgcgcgttggcgatttgcaacgctccatcgatttttataccaaagtgctgggcatgaaactgctgcgtaccagcgaaaacccggaatacaaatacagtctggcgtttgttggctacggcccggaaaccgaagaagcggtgattgaactgacctacaactggggcgtggataaatacgaactcggcactgcttatggtcacatcgcgcttagcgtagataacgccgctgaagcgtgcgaaaaaatccgtcaaaacgggggtaacgtgacccgtgaagcgggtccggtaaaaggcggtactacggttatcgcgtttgtggaagatccggacggttacaaaattgagttaatcgaagagaaagacgccggtcgcggtctgggcaactaatctcctgccgggcgtgaactcatcgcgcccgcatctttactgcatcgacaagtaatatttgtcataatgcgcgctgcaatttatccgtattaagagaatcagatgtccgataacgctcaacttaccggtctgtgcgaccgttttcgtggtttttatcctgttgtgatcgatgttgaaacagccggatttaacgccaaaaccgatgcgctgcttgagattgccgccatcaccctgaaaatggatgaacaaggctggctgatgccggacaccacattacatttccacgtcgaaccatttgtcggcgcaaatttgcaaccagaagccctcgccttcaacggcattgacccgaacgatcccgatcgcggcgcggtcagcgaatacgaggcgctgcacgaaatttttaaagttgtacgtaaaggtattaaagcgagcggctgtaaccgcgccattatggtggcgcacaatgccaattttgatcacagctttatgatggccgccgcagaacgcgccagtctgaaacgtaacccgttccaccctttcgccacttttgacactgctgcactggccgggctggcactcggacaaaccgtattgagtaaggcttgccagaccgctggcatggacttcgacagcacccaggcgcactccgcgctgtacgacaccgaacgcactgctgtgctgttttgtgaaatcgtcaaccgctggaaacgtctgggaggctggccgctatctgccgccgaagaggtgtaatcgagtcgatgcctgatgacatgcaatgattcaggcatctatagtgaggctattccacgcatcctgcatgatattcacggggaatagcgttaatggcagataatccagaccctagtagcctcctgccggacgtgtttagtccggcgacccgcgactggtttcttcgcgcctttaaacagccgaccgctgtccagccgcaaacctggcatgtggcggcgcgaagcgaacatgcgctggtgattgcaccgaccggctccgggaaaacgctggcagcatttctctacgccctcgatcggctcttccgcgaaggcggcgaagatacccgcgaggcgcataagcgtaaaaccagtcgcatcctctatattagtccgataaaagccctgggcaccgacgttcagcgcaacttgcagatcccgttgaagggtattgccgatgaacggcggcggcgcggcgaaacggaagtcaatcttcgcgtagggatccgtactggcgatacgcctgcacaggaacgcagcaaactcacccgtaatccgccggatattctgatcaccacacccgaaagtctctatctgatgctgacctcccgcgcgcgcgaaacgctacgcggcgtcgaaacggtaattattgatgaagtccacgcggtagcgggcagtaaacgtggtgcgcatctggcgttaagtctggagcggctcgatgcgctgctccacaccagtgcacagcgaattggcctttctgccactgtgcgcagtgccagcgatgtggcagcatttcttggtggcgatcgcccggttacggtagtcaacccgcccgcaatgcgccatccgcagatacgaattgtcgtaccggtcgccaatatggatgatgtcagtagcgtcgccagcggcaccggcgaagacagccatgccggccgggaaggctccatctggccatatattgaaacgggtatccttgatgaagtgttgcgccatcgcagcaccattgtctttactaatagccgggggctggcggaaaaactgacggcacgattaaatgagctttacgccgcacgcttacagcgttccccgtctatcgccgttgatgcggcccatttcgagagcacctccggcgcaacctctaaccgtgtacaaagtagcgacgtttttattgcccgcagtcaccacggctccgtctctaaagaacaacgagcaatcaccgaacaggcgctgaaaagcggtgaattacgctgcgtggtcgcaacctccagtcttgaactggggattgatatgggcgcggtggatctggtgattcaggtggcaacgccgctttctgttgccagtgggttacaacgcattggtcgcgccggacatcaggttggcggtgtatctaaagggctgtttttcccccgtacccggcgtgatttagtcgattccgcagtcattgtagagtgtatgttcgcaggcaggctggaaaacctgacaccaccgcataatcctctcgacgtccttgcgcagcaaaccgttgccgccgcggcgatggatgcattacaggtagacgaatggtactcccgcgtacgccgtgccgcaccgtggaaagatctgccaagacgtgtttttgacgccacgctggatatgctttccgggcgctatccctctggcgatttttctgcttttcgccccaaactggtctggaacagggagaccgggatattgaccgcccgacctggcgctcaattgttggcggttaccagcggcggcaccattccggatcgtggcatgtatagcgtgttattacccgaaggtgaagaaaaggccggtagccggcgggtgggtgaactggatgaggagatggtatatgagagccgggtgaacgacattatcactctcggcgctaccagttggcggatccagcaaatcacccgcgatcaggtgattgtgactcctgctccgggtcgttctgcccggctccccttctggcgtggtgaaggtaacggacgtccggctgaattaggcgagatgatcggcgattttcttcatttgctggcggatggcgcgttcttttccgggactattcccccgtggctggcagaagaaaatacgatcgccaatattcaggggttgattgaggagcagcgcaacgcgacgggcatcgttccggggagtcgccatctggtcctcgaacggtgccgtgatgaaattggtgactggcgtattattttgcactctccctatggaagacgggtgcatgaaccctgggcggtggcgattgccgggcgaatacatgcgctatggggcgctgacgcgagcgtggtcgccagtgatgacggcattgttgcacgtattcctgacaccgatggtaaattgcccgatgccgcgatttttttgtttgaaccagaaaagttgctgcaaattgtccgcgaggcggtaggcagcagcgcacttttcgccgcccgttttcgcgaatgcgccgcgcgggcattattaatgccggggcgcactccgggccatcgcaccccgctttggcaacaacggctgcgcgccagtcagttgctggaaatcgctcagggatatccggattttccggtcattctcgaaaccctacgcgaatgtctgcaagatgtttatgatcttcccgcactggaacgtttgatgcgtcgcctgaacggtggcgaaattcaaatatccgatgtaacgaccactacgcccagccctttcgccacaagtttattgttcggctatgtcgcggaatttatgtaccagagcgacgccccgctggcagagcgccgggcatccgtactgagcctggacagcgagttactgcgcaatctactcggacaggtcgatccgggggaattactcgacccgcaggtcattcgccaggtggaagaagagttgcaacgactggctcctggcagaagagcgaaaggtgaagaaggattgttcgacctgctgcgcgaactggggccaatgaccgttgaagacctggcgcaacggcatacaggcagcagtgaagaggttgcgagctatctggaaaatcttcttgcagtaaaacgaatcttcccagcgatgattagcggacaggagcgtcttgcctgtatggatgatgccgccaggctgcgtgatgccctcggcgtacgactaccagagagtttgccagagatttatttacatagagtcagttacccgcttcgcgacctctttctgcgctatctccgggctcatgctctggtcacggctgaacaactggctcatgagtttagtctcggtattgccattgtcgaagagcagcttcagcaactgcgtgaacagggtctggtgatgaatctgcaacaagacatctgggtgagcgatgaagtatttcgtcgtctgcgtttgcgcagcctgcaagccgccagagaagcgacgcgtcccgttgcagccacgacctatgcgcgattgctgctggaacgtcagggcgtattacccgccaccgatggtagcccggcgctctttgccagtacaagcccaggcgtttatgagggcgtagatggcgtgatgcgggtgatcgaacagcttgccggagtcggtttacccgccagtctctgggaaagccagatcctgcctgcccgcgtacgcgactatagcagtgaaatgctcgatgaattactggcaaccggtgcggttatctggagcgggcaaaaaaaactgggtgaagatgacggcctggtggcactgcatctacaggaatatgctgcagaaagcttcactcccgccgaagcggatcaggcgaatcgtagcgcgctgcaacaagcgatagtcgctgttctggctgacggaggagcctggtttgcacaacaaatcagccaacggatacgcgacaaaatcggcgaaagcgttgatctctctgccctgcaagaggcgttatgggcgctggtctggcaaggcgtcatcaccagcgacatttgggcaccgttacgcgccctcacccgcagcagttccaacgcacgcaccagtactcgccgcagtcaccgggctcgtcgtggacgtcctgtctatgcgcaacccgtcagcccgcgggtatcttacaacacaccaaatctggctggacgctggagcttattgcaggtggagccactaaacgataccgaaaggatgctggcgctggcggaaaatatgctcgaccgctacggcatcatcagtcgtcaggcggtgatagccgaaaatatccctggcgggtttccaagcatgcaaacgctttgtcgaagtatggaagactccgggcgaattatgcgaggtcgttttgtagaaggtctgggtggcgcgcaattcgctgaacgtctgactattgaccgattgcgcgatctggcgacacaagccacgcaaacgcgccactatacaccagtggcgctctctgccaacgatccggctaatgtgtggggaaatcttctgccctggcctgcacatccggcaacgctggttccaacgcgtcgggcgggtgcgctggtggtcgtttctggcggcaaattgttactctatctggcgcaaggtggcaaaaaaatgctggtctggcaggaaaaagaggaattactcgccccagaggttttccacgcgctgactaccgcactgcgtcgcgaaccacggctgcgctttacgctaacagaagtgaatgatctaccggtccggcaaacgccgatgtttacgctgctgcgtgaggcgggatttagtagtagcccacaagggctggattggggataaagaaaggactgacggatgcccgttcgcatccgtcagtattgcaggacggattattccgcgtccggctcttcagacttgtatttagcggcagtttctttgatcagctgctgcagttcgccacgctgatacatttcgatcacgatatcacaaccgccgaccagctcgccgtcaacccacagttgcgggaaggtcggccagttagcatatttcggcagttccgcacgaatgtccggattctgcagaatatcaacataggcaaaacgttcgccacatgcggcaagcgcctggactgcctgggcagagaaaccgcagctcggcagtttcggactacctttcatgtacagcaggatcgggttttcagcaatctggcgttggattttttcgatagtggtgctcattgtcttgcttcctcaaacttctttacggcagtaatctgacattgtagcgggtcagtgcggcatcggaaaataacattttcatcacgcttttgctattttatccctttgctctatttgttgcatttcaaatattcgtttcttctctgatgccggcaaactggcgtatttataaccatttttagctttcactgctgcatttttttgcgctcgccaacgaaacgtattttttaacaataaaagctattaactttctcttcttctatgcattagaatcatcaagttttgtaaatcagacgcaggcatgatagacctgcctttacagagggacgctcagtggcgcggataaaccgtattagcatcacgctctgtgctttactttttaccaccctgcctttaacgcctatggcccatgctagtaagcaagccagggagagttctgctaccactcatatcaccaaaaaagcagataaaaagaaaagcacggcaaccaccaaaaagacccagaaaacagcgaaaaaagccgccagtaaaagtacgaccaaaagcaaaaccgcttcttccgttaaaaaatcttccattaccgcttctaaaaacgccaaaactcgcagcaaacacgccgtcaataaaacggccagtgccagctttaccgaaaagtgtaccaaacgtaagggctataaaagccattgtgtgaaagtcaaaaatgccgcgagtggaactcttgccgacgcgcacaaagcgaaggtgcaaaaagctacgaaagtggcaatgaataaactgatgcagcaaattggtaagccatatcgttggggtggcagcagtccgcgtaccggttttgattgcagcggcctggtttattacgcttataaagatttggtgaaaattcgtattccgcgtacggcgaatgaaatgtatcacctgcgtgatgcagcgccaatcgaacgtagtgaactgaaaaacggcgacctggtctttttccgtactcagggacgcggcacagccgatcatgtcggcgtgtatgtcggcaacggcaaatttattcagagtccgcgcacaggtcaggaaattcaaatcacttctctcagtgaagactactggcagcgccactatgttggcgctcgtcgggtaatgaccccaaaaacacttcgctaaaactttaccctgttgttacggcaacagggtaagttcatcttttgtctcaccttttaatttgctaccctatccatacgcacaataaggctattgtacgtatgcaaattaataataaaggagagtagcaatgagtttcgaattacctgcactaccatatgctaaagatgctctggcaccgcacatttctgcggaaaccatcgagtatcactacggcaagcaccatcagacttatgtcactaacctgaacaacctgattaaaggtaccgcgtttgaaggtaaaagtctggaagagattattcgcagctctgaaggtggcgtattcaacaacgcagctcaggtctggaaccatactttctactggaactgcctggcaccgaacgccggtggcgaaccgactggaaaagtcgctgaagctatcgccgcatcttttggcagctttgccgatttcaaagcgcagtttactgatgcagcgatcaaaaactttggttctggctggacctggctggtgaaaaacagcgatggcaaactggctatcgttagtacctctaacgcgggtactccgctgaccaccgatgcgactccgctgctgaccgttgatgtctgggaacacgcttattacatcgactatcgcaatgcacgtcctggctatctggagcacttctgggcgctggtgaactgggaattcgtagcgaaaaatctcgctgcataataactgatggcaaatgcagcattgcctgaagcgctacgcttatcaggcctacgcggatcatcgatgtaggtcggataaggcactcgccgcatccggcaagataaatcgcacgttgtcagcaactgtaacgcagaaggttatccttctgcgtttttgtttaattagctgttagcaacgcaaactgtttcaggttgttttctggcactcataaacaccagcaataatgccagtcccgcgacaatcgctcccatcaccggcacaaagctgtatcccagcccagcggaaattaccgcaccaccagcagctgctcccagcgcatttccaagattaaaggcaccaatattgacactactagacagacctggcgcttcactggcgacacgcatcacgcgcatctgtaacggcggtacgaccgcaaaggttgctgcgccccacaccaccatgctaatagctgcgccgaactcattgcgggccaggaacgggattgccagcataatcaccatcaacaacaacaaaaagcctttcaacgtgccgttaacactacgatctgccagtttgccgccgagatagttaccgatagagaatccgacaccaatcagcaccagcattgccgtgacgaacaccggtgttgcgtgggtaatactttgcagtaccggagagatataggtgtagagagtaaacattgcaccagctcccagtaccgtcgtcagcaatgcagacagcacctgcggacgcattaataccgccagctcttttttcacttcaggtcgtgcccctgcaccacctttaggtaaactgaagaacagacttaccatactaatcactcccagccccgccgttgccagaaaactcatccgccagccgatggtttcacccaaccaggtcgccgccggcacgccaccgatatttgccagggttaaccccataaacatagtggcaactgcgctggcctgtttatgttttggcaccacgcttgcggccacgacactacccaaaccaaaaaatgctccgtgattcaggctggtcaaaatgcgactaagcatcagggtcatataatccggcgcgatggcggaaagtacgttgccgagcgtgaaaattgccatcaggaaaatcaacgcactgcggcgggcacgatgagaaagtagaagcgtcatcagcggcgcgccaaccattacgccaactgcataggcactgattaacattccggcagcgggaatgctgacatccacaccgcgcgcaatgacgggcaacaagcccattgggctgaactccgttgtcccgataccaaacgcgccaatcgccagcgccagcaacggatagttaattttcatgccttatctccacctcttcgcgtcattacgcgatattcattaaagtggcgaaagcatgacagcaatcacaaaaaaatgaaaataacaaaaagagaaaacacttttgccattttgctaacaaacaggaaggagatgcgagggagaacgcgctccctcgagaggaaatcagtgcagcgcggcagtcaaacccacggctacgatcaaaccgaggacgataatcgttgttaccagtgaaaatttaaggtcggtgctcatcaagttttctccttttttattaccacacaaaaagtgatattacgcatttttacacactgtgatgaaaaaatctcccgtcatttataatgataagtgtttttaccacttccccttttcgtcaagatcggccaaaattccacgcttacactatttgcgtactggccattgaccccttcctgacgctccgtgtcgtttttccggcgtaccgcaacacttttgttgtgcgtaaggtgtgtaaaggcaaacgtttaccttgcgattttgcaggagctgaagttagggtctggagtgaaatggaatggcaacaataaaagatgtagcgaaacgagcaaacgtttccactacaactgtgagtcacgtgatcaacaaaacacgtttcgtcgctgaagaaacgcgcaacgccgtgtgggcagcgattaaagaattacactactcccctagcgcggtggcgcgtagcctgaaggttaaccacaccaagtctatcggtttgctggcgaccagcagcgaagcggcctattttgccgagatcattgaagcagttgaaaaaaattgcttccagaaaggttacaccctgattctgggcaatgcgtggaacaatcttgagaaacagcgggcttatctgagcatgatggcgcaaaaacgcgtcgatggtctgctggtgatgtgttctgagtacccagagccgttgctggcgatgctggaagagtatcgccatatcccaatggtggtcatggactggggtgaagcaaaagctgacttcaccgatgcggtcattgataacgcgttcgaaggcggctacatggccgggcgttatctgattgaacgcggtcaccgcgaaatcggcgtcatccccggcccgctggaacgtaacaccggcgcaggccgccttgccggttttatgaaggcgatggaagaagcgatgatcaaggtgccggaaagctggattgtgcagggtgactttgaacctgaatccggttatcgcgccatgcagcaaatcctgagccagccgcatcgccctactgccgtcttctgtggtggcgatatcatggcaatgggcgcactttgtgctgctgatgaaatgggcctgcgcgtcccgcaggatgttagcctgatcggttatgataacgtgcgcaacgcgcgctattttacgccggcgctgaccacgatccatcagccaaaagatagcctgggtgaaacagcgttcaacatgctgttggatcgtatcgtcaacaaacgtgaagaaccgcagtctattgaagtgcatccgcgcttgattgaacgccgctccgtggctgacggcccgttccgcgactatcgtcgttaatcacccgttgcgggagtctcttccggctcccgcagccactccttattcagcgtctcactatcgccgagatactcaagcaaccaggttaacgcagggctcatatcattttgctgccatgtcagacaacatgcgctatccggaaaggggttttccagttctaatgctacccacttcccctcattaagccacggtttggcgaaatgtgttggcaccatccctatgcataatcctgcgctgatacaggttgcgctactttcccagtcaggcacgacaactcttttttggttatccagcaaccaggtaatacgtttaggtagcgttcggctggtgtcttcgcgcaccaagctcggccagttgcgcaacgtatcatcgctgaacgggccatccatcaacgccagcgggtggtgactggcaacaacgcaactccagcttagcatccccatatcccggaaggcataacgaccgcctaccggaatcgcgcgtgttgcgccaatcgccagttccacgcgcccgtcggaaagcgcatcccagacaccgttgaacacttcctgaaagacaagaagttcgacatcatcaaaatggcgataaaaatcaacgatcatctgccgtgtacgttctggcctgacaatattatccactgcgatagctaactgaccgcgccagccgttcgctatctgctgacattgctggcgggtgatctgcatttttttgacaacagagcgcccttctttgagaaaccacgctccagcagcggtcagctccacatcacggtgccgtcgttcaaagagcggcaccgccagccactcttccagctgacgcacggtatagctgaccgcagaaggaacgcgatgcagctcctgtgccgcagcgctaaaactaccattacgcgctaccgcatcaacaacttcgagactatattcactccacatagtctgcctgcaaaatttttgaaaccagtcatcaaatattaccgtttcacaacactaatttcactccctacactttgcggcggtgtttaattgagagatttagagaatatacatgcaacctgggaaaagatttttagtctggctggcgggtttgagcgtactcggttttctggcaaccgatatgtatctgcctgctttcgccgccatacaggccgacctgcaaacgcctgcgtctgctgtcagtgccagccttagtctgttccttgccggttttgccgcagcccagcttctgtgggggccgctctccgaccgttatggtcgtaaaccggtattattaatcggcctgacaatttttgcgttaggtagtctggggatgctgtgggtagaaaacgccgctacgctgctggtattgcgttttgtacaggctgtgggtgtctgcgccgcggcggttatctggcaagcattagtgacagattattatcctagtcagaaagttaaccgtatttttgcggccatcatgccgctggtgggtctatctccggcactggctcctctgttaggaagctggctgctggtccatttttcctggcaggcgattttcgccaccctgtttgccattaccgtggtgctgattctgcctattttctggctcaaacccacgacgaaggcccgtaacaatagtcaggatggtctgacctttaccgacctgctacgttctaaaacctatcgcggcaacgtgctgatatacgcagcctgtagtgccagtttttttgcatggctgaccggtagtccgttcatccttagtgaaatgggctacagcccggcagttattggtttaagttatgtcccgcaaactatcgcgtttctgattggtggttatggctgtcgcgccgcgctgcagaaatggcaaggcaagcagttattaccgtggttgctggtgctgtttgctgtcagcgtcattgcgacctgggctgcgggcttcattagccatgtgagcctggtcgaaatcctgatcccattctgtgtgatggcgattgccaatggcgcgatctaccctattgttgtcgcccaggcgctgcgtcccttcccacacgcaactggtcgcgccgcagcgttgcagaacactcttcaactgggtctgtgcttcctcgcaagtctggtagtttcctggctgatcagtatcagcacgccattgctcaccaccaccagcgtgatgttaagtacagtagtgctggtcgcgctgggttacatgatgcaacgttgtgaagaagttggctgccagaatcatggcaatgccgaagtcgctcatagcgaaagtcactgatctatatcgatatacttatacttaggctgctaacaaaattttgttgtatgattgaaattagcggcctatactaatttcgagttgttaaagctacgataaatattatgtttttacggggacaggatcgttcccgactcactatggatagtcatttcggcaagggttcctcctttccctctgttctacgtcggattatagactcgcggttttttctgcgagatttctcacaaagcccaaaaagcgtctacgctgttttaaggttctgatcaccgaccagtgatggagaaactatgagtagtagctgtatagaagaagtcagtgtaccggatgacaactggtaccgtatcgccaacgaattacttagccgtgccggtatagccattaacggttctgccccggcggatattcgtgtgaaaaaccccgatttttttaaacgcgttctgcaagaaggctctttggggttaggcgaaagttatatggatggctggtgggaatgtgaccgactggatatgttttttagcaaagtcttacgcgcaggtctcgagaaccaactcccccatcatttcaaagacacgctgcgtattgccggcgctcgtctcttcaatctgcagagtaaaaaacgtgcctggatagtcggcaaagagcattacgatttgggtaatgacttgttcagccgcatgcttgatcccttcatgcaatattcctgcgcttactggaaagatgccgataatctggaatctgcccagcaggcgaagctcaaaatgatttgtgaaaaattgcagttaaaaccagggatgcgcgtactggatattggctgcggctggggcggactggcacactacatggcatctaattatgacgtaagcgtggtgggcgtcaccatttctgccgaacagcaaaaaatggctcaggaacgctgtgaaggcctggatgtcaccattttgctgcaagattatcgtgacctgaacgaccagtttgatcgtattgtttctgtggggatgttcgagcacgtcggaccgaaaaattacgatacctattttgcggtggtggatcgtaatttgaaaccggaaggcatattcctgctccatactatcggtagcaaaaaaaccgatctgaatgttgatccctggattaataaatatatttttccgaacggttgcctgccctctgtacgccagattgctcagtccagcgaaccccactttgtgatggaagactggcataacttcggtgctgattacgatactacgttgatggcgtggtatgaacgattcctcgccgcatggccagaaattgcggataactatagtgaacgctttaaacgaatgtttacctattatctgaatgcctgtgcaggtgctttccgcgcccgtgatattcagctctggcaggtcgtgttcagtcgcggtgttgaaaacggccttcgagtggctcgctaaaggctattctatcgccccctctccgggggcgatttcagatcaggcttctgtgcctggttgattcatggcattttctcgtgccgccagcacacgttctaccgtatctaccactgcctgagtttgtggatcgatttcaatgttgacgcgtgcgccaagttttttcttcccaagagtcgtgcgttccagtgtttcccgaattaaatggacgcaaaaacgcgttggcgtgacttcgccgacggtcaggctaataccgtcgatgccaataaatcctttgtacagaatatatttcatcaactgactatcctggactttaaaccagatctggcgattattttcactggttaatattttcgccacttcagcagtggtcataatatgaccactcattaagtgtccgccaatttcatcactgaatttcgccgcacgctcaacgtttacccaatcccccacttttaaatcgccaagattggtaatgcgtaacgtttctttcatcaggtcaaaactgacatggttgccgttaatttccgtcacggtcaggcagcaaccgttatgcgccacggaagcaccggtttccaggccgtccagcatgtggtcgggtaactccaccacatgcgtacgaaaatttggtttctcgtcaatgctcaccagttttgcggtgccctgtacaatccccgtaaacatacttacaactcctgaaatcagttaagacattctgttcagcacaatagcaggtggaaaacgcccttaccagtgaaggggtaagaatggctattttttcactggagaattaataaatcctcgctacaatagactgaatttcccctgcttcttctttttgctgcccattcaggcggctttttagtctctcatataactacaaataaaaggtgttcacgtgcagaagtatatcagtgaagcgcgtctgttattagcattagcaatcccggtgattctcgcgcaaatcgcccaaactgcgatgggttttgtcgataccgtgatggcgggcggctatagtgccaccgacatggcggcggtcgctatcggtacttctatctggcttccggcgatcctctttggtcacggactgctgctggcattaacgccggttatcgcgcaattaaatggttccggtcgacgtgagcgcattgcgcatcaggtgcgacaaggtttctggctggcaggttttgtttccgttctcattatgctggtgctgtggaatgcaggttacattatccgctccatggaaaacatcgatccggctctggcggacaaagccgtgggttatctgcgtgcgttgttgtggggcgcgccgggatatctgttcttccaggttgcccgtaaccagtgtgaaggtctggcaaaaaccaagccgggtatggtaatgggctttatcggcctgctggtgaacatcccggtgaactatatctttatttatggtcatttcggtatgcctgagctcggtggcgttggttgtggcgtggctactgcggcggtgtattgggtcatgttccttgccatggtttcttacattaaacgcgcccgctccatgcgtgatattcgtaacgaaaaaggcaccgcaaaacccgatcctgcggttatgaaacgactgattcaactcggtttgccgattgcgctggcactgttctttgaagtgacactgtttgccgtcgtggctctgttagtgtctccgctcggtattgttgatgtcgcaggacaccagattgccctgaactttagtagtctaatgttcgtgcttccaatgagcctggcggcagcggtaactatccgcgtaggttatcgtctgggtcagggcagtacgctggatgcgcaaaccgctgcgcggaccgggcttatggtgggtgtctgtatggcaaccctgacggccattttcacggttagtctgcgggagcaaatcgccctgttgtacaacgacaatcccgaggttgtaacgctggctgcgcatttgatgttgctggcggcggtatatcagatttctgacagtatccaggtgattggcagtgggattttgcgtggttataaagatacgcgttccattttctatattacctttacggcttactgggtgctgggcttgccaagcggctatattctggcactgaccgatctggtcgttgaacctatggggccagcaggcttctggataggctttattattggcctgacgagcgcagccattatgatgatgttgcgtatgcggttcctgcaacgtctgccgagtgccatcattctgcaacgagcatcccgctaataaagacaaggcgcaaccttcacgggttgcgcctgtatttttacgcaggctggagcgttgcgccaatcccgtcttcgtctggctgtaatttcagagcgttacacagagtttgccgactggcatctgttatctcaacgtgtatatccccggtaacttcccctttcacattgatgaagtcaggactaatttcttttgcactggtttgcaggcaaatcgctccctctccgcgcaggcgtttcactttcagttgcacatgcgttgccgcatcagtgatcagccacagttttccaccattcagattgatgttaccaacaatgaaagtgacactgtcaccttttaccgtactgccgtctagaatcaacacaccgccctgctgtacagtaatcgtactttgttgcagctctgcgccataaccaataatcatactagcgccgtccagtaatgcaacactcccggtcagttcaaccggtgcgcgatcttcctctacgacaaaattttcgtccgcgctggtgggactcaacaggatcactgtcccaccttgtattaccgcgttttccagcgtaccggcatgcacttcagcccgaccacccacattcacggacaggttttgcgtcttaccggaactgtagagctgaaggccatccgtccccagacgataaatggatccattctcaacaatagtgtcagagtcttcaccaccgagattattcatggtgccaccagcaagcaacgtatcactggctttcccggccagcataaaaacgccgccctgattaatctcacaattgctggcttccccacctggatacaccaacaattcaccaccttcatctaccacgaccgcactggttgtcccattaaccaacaggccgccctcttgatcgagaatgattttttccgcgcgatgtccttccagtacacgcaggttaccgccattttccagcaacaaaccgcaggcataacctttatcaacgctgaattcaccttcgggatggcggccattaaccgtagcgagcgtagagagactaattgcgcctccctcggactgaacaatatctgtggcaatggcaccatcgctgacgcttagcgtgccattgttaccgtactgtgtgcatttggcgatcccaccggttgccactttcaaccagccagcccccgtgaccacggtattttcggctcttccgccagcttcaacaatcaactcgccttcagtaagttgcgtcgcgccaatgacctcgccggtcttaacaatttgcacgttcccgtcgctcatcaagtttttcgcatcagatcccatgatttattcctttgctgcatctgtgtgcctttattgctacctaagtgtaaaggctacggaggatttatccacgacagatttgagatggtggcaaacaactctgtttaaactctgatacacgaattattgggttgtatcagatgtaaatgcgatcctgaataaaaatcacccttgcaaatcaacaaaatatagccaatttgcttaaaagctctgcaaacggtcgaaatagcgcagaaaattacgttttgcctcttgccaccttcccactctgccgctaatattcgtccccgttgtcacctacaacgttgcgttcatagctcagttggttagagcaccaccttgacatggtgggggtcgttggttcgagtccaattgaacgcaccatcctgcgtccgtagctcagttggttagagcaccaccttgacatggtgggggtcggtggttcgagtccactcggacgcaccagattttcttaatctggtcttctcctttttccctctgtttcttctctgtatccaatacgttaaaagatttacactgtcttcgtatgcgttatcagaaggagaatcgctatggcaactttgttacaacttcattttgcttttaatggcccatttggcgacgcaatggctgagcagcttaaaccacttgctgagagcattaatcaggaacctggttttctgtggaaggtatggacagaaagtgaaaagaaccacgaagccggtgggatctaccttttcactgatgaaaaaagcgcccttgcctatctggaaaaacatactgcccgactgaaaaatctcggcgttgaggaagttgtcgccaaagttttcgatgtcaatgagccacttagtcaaatcaatcaggcaaaactcgcctgacagaatttaatcaagggcggttagcgcccttttcatccctgtctgaaatttctcaaattctaaaaatctcaaccaaacttatctgataacactaaattcgaaagaatgcgtacaggtaagtaacaatgaaaaaaattgctattgtgggtgccgggcctacggggatctacaccttattcagccttctacagcaacaaactccactttctatttctatcttcgagcaggctgacgaggccggtgtcgggatgccatacagtgatgaggaaaacagtaaaatgatgctggcaaatattgccagtattgaaataccgccgatttattgtacgtatctcgaatggctacaaaagcaagaagacagccatctccagcgttatggcgttaaaaaagaaaccttgcacgatcgtcagtttttaccgcgaattctgctgggcgaatatttccgcgatcaatttttacgactagtagaccaggcacgacagcaaaaatttgcagtggctgtttatgaaagttgccaggttaccgatctgcaaattacaaatgctggcgtcatgctcgctacaaatcaggatttacccagcgagacgtttgatttagcggtgatcgccacgggtcacgtctggcctgatgaagaagaagcaacccgaacgtattttcccagcccgtggagtggcctgatggaagcaaaggtcgatgcgtgtaacgtgggtattatgggaacatccttgagcggactggatgcggcaatggcagtggctattcagcatggtagcttcattgaagatgataaacaacacgtcgtttttcaccgcgataacgcaagtgaaaagctaaatatcacgttgttgagccgcacgggtattttacccgaagccgatttctattgccctattccctacgagcccttacacatcgtcaccgatcaggcattaaatgctgagattcaaaaaggcgaagagggccttttggatcgggtatttagattgatagtagaggaaatcaagtttgctgatccagactggagtcaacgcatagccttagagagcctgaatgtcgattcctttgctcaagcctggtttgccgagcgcaaacaacgcgacccatttgactgggcagaaaaaaatctccaggaagtcgaacgcaataaacgagaaaaacatactgttccctggcgttatgtcattctgcgcctgcatgaagccgtacaggaaattgttccacatctgaatgaacacgaccataaacggttcagtaaaggccttgcccgggttttcatcgataattatgcggcaatccctagtgagtctattcgtcgcctacttgccttacgtgaagcgggaatcattcatattctcgccctcggtgaagactacaaaatggaaattaatgagagccgcaccgtcctgaaaacggaagacaacagctacagctttgacgtttttattgatgcccgcggacaacgtccgcttaaagtgaaagatatccctttccctgggctacgcgagcaattacagaaaacaggggatgaaatccctgatgttggcgaagattatacgttacagcaacccgaagatattcgtgggcgcgtagcgttcggcgcgttgccctggttgatgcacgaccagcctttcgttcagggacttacggcatgtgcagaaattggtgaggcgatggctcgggcggtcgtaaagcctgcatcccgtgctcgtcggcgtcttagctttgattaaaggtaaagctatcagcactcaacaaactgatgctgttcattaagacgatagcggactccggctcgaatattgttttcaccttcaatggcgacggcgaagcgaactctttcgccgtcatgatatgccagtgcggcgcttcctcctggcccgagaataatactgtcgaccacgcccgtgctcactaccgtactattttcaccgctggcaatgatgtgtacattgtcgccgctgttggcaattctggcgtttgcgccaaagctggcgatttgcaccaggtcaccattactggcgacatgacaccgttcacccaatgtacaaacgcgtactcgcattccggtattcgcaatccgactgctatctccagcgctgcttatccggctagaattaccggttacagcaacccgtgcgcgttcaccggagctgccaatgtgactgttaaagccgacacttccaatccgcacgctataacccatactggcaatttgcgcggcatacccagcggttgcgattctggcgttatcctcacaacagccgatgcgagcatgatcgtcgctgcgggcaaactgactgcaaaatggtctctctccggggtctgtggccagtttttgcatagaggaaacttcctgatgcgcgaagttttcatccgccagccattttttccacgcatactcaaccagactctccgcccagtccgtatatccttcctcaatcagtgcatgatgaatatcggcataactaccgccgcgtgggaaatggcgcaggaaccagcgatacatcaccgctccgatacgccattctcgcaggtctgcttgtgtaatgatcattcgttagtgccggtgatagccatcgaccatgcttttaaaggtttcgtgtggcgtacgccccgtggtgcaaagataaagatgaccgaagataaaaaagaggcttataaatgccagagcaaaatgtgtctgcaataaccagtatcttacgccaggaaacacatctcccacggcttgcggatagagacacagcagccccgtcaatagtaacaacggcagcaatccatacatgacaccaacataggcgacctgctgtaagggattaaatttagactgggttgttgccgggaaaggatgttcttccccctgcataatgccaaacaaataaaatcgcgtttgttttgccgctcgttccagccacccctgacgacgaatgcgatagtggtgaccattatccccaacggcattgatcagcacaaagccgagccagcatgccagtaacaaaaatccgcaaacttcatgcaccgcaaccagacttttaaccgcagttgcgcccaccatcgcaaagtgatttatcagcccactggccagcaacaatacaaagagtaacgcattgctccagtgccataatctgaccgctttgctgtaaagataaatcttctcaccatgatcggtggcacttttcttcacgccacgagcacgaagcaaggcatgcagccccagcaccaaccacatcccaaccagcaatactccggcaatgatcaaccacaccggccaaaattcgggagtgaactgtggcacatagttcgctaactggctctgaaactgttcagcatgttggctcgggttcatacattttcctttttaatcaaatgttgaccgaaccggcgatacagatgcggtttcccggcaccaggtagctgatattgatagtatttattttgctgcaaccacgcctgaatttctgggctatcttcgcgaccaaagatcaatgcgtgttccgggcaggcgctgacgcaaatgggcggaaagccttttgccagtcgggactcagcgcagaaatcacatttatctgccactttagtgacagggttaaggtagcgaacctggtacggacaagcgccaatgcaataactgcagccgatgcactggcttttttctacccgcacgatcccctgctcatcacgccagctcgcccccgtcgggcaaacgtcgatgcacggagcatcttcgcagtgctgacaactctggcgaaaaaagtgatactgcgtttcgttgtcgttatcggtgactggaatgtgtgctatgcttaaacggcttccctgagcggggacgtggttagttttacggcatgcgcgggcgcaaatattacagccattgcaccgactctcgtcatgaatcatggcataccgaacttccttttcttgcctcgtgttcgctaacagagaagacgcagaaccagtaaaaaagattactgttcccatccccagaacaaatttgcgtcgagtgaaggacatctgattatcccctaatgcagtggctgcaactgtccaccctatccatgacatctccctgaaatttcaggggttctgaaactgctctacctcgaaccattcgcataagccataagccttgccataggtcataaatcgctcgctaaacaagtacaacaccgccgtgctactctccacctgccgtatatcggcatattcaggtgcaacatccatcgcggcgatcgcggcttcaatctgcgcttcctggaagtaatatggcgcttgcatcagcatggcgactttgtaaggacgaggatacgtctggcactcaaaacgaacggcgtgtgcaatggcgcgacaaatgtcctgctccacaacttgcaaagacatcgccgcgtagttttcactcatggcctgcgtactgtaatagtaatcatccttgcttcccgtcaaacaagcgatatccgcgtagtctccgttctgcttaatgctttccagcaaaacactcagttcctcttctgcaaccaaatagggtgggctgagaaacacggcgcgcgccaccagctgcccagccgcagaatgctggcgaatgaactcagccaggatttcagcaggttctggttcggttaccgtatcaacggggtgacgcatcccctgcaaccattgccgcttcgcctcgtcaacttcgctgactttcgctaacggcaattcatcctgatggttcatcttacccattccttacgcaggcagtagattgtgtgctgccagatcggcggcaatatcttccagccccagacgctgcaatgtttcgcgggttggacaaccaagctgtgggtcccagcccatttctttgtagaacatcgtgaggctagcatgcatatcgtcacgatccattttgtcagtaccttcagtaaagaccgggatctgcggatccttgtcgaatacccaggaacagataagatcgtgttcattacgcatatctttggtttgcatcagttttaccgtgtaggcacgatgcaacgtaaaaatacgctctgcagctaaatctaatttttcctgagtcatctcttcgccggtgatcgctttgaagaatttggcttcaagcgccagatcgccccggtaattacggcttttcagcgggctaacggtcattggccagacccagttgcacagggtgacggcgttatgcaaacagacccgcaacaggctccactttgcatatttaatttttgcgtcattgattggcgtgtagtttttggtttcatcgtaagcatcttcagaaccaaaaagttctttcgccacttcacgttgcagtttcaatggcaagccggaaccaataaagttgatatgggtatgcgtcatgcagtcacggttgaacatacagttaacaatggaaccgacctgcgcactcgcttcattggcatggtgaaccggatagccaaacgggctccagagtttatttttcgcgtagccccagtactcttcacccaaattccagcgttctgcgatggcataactaccatcagccaggtgactcagctcacccacacgatgcgccagacggtagtaaaaatctttaatgaagttaacgtcacccgcttccagttgatcccagcgaatttctgcatactcttcagctggcagaacacgcttgaacacacctttgctgtaacaataagtaaagtcgcgatgcaactgcccgtagttacaccataggccgtagtcatcgaacaaattcagacccaccaggttaccaatcacacgaccatcgtctttatcttcaaaatctttcggcccgttcgggaagatggtggtatggacaaagtttgctacacaagtgttaccacctgtgctgggcacgccaaactctttcacccgaggaatattcatttgggtcatacaacggatcgggcaagagtggcagccgctcatttttactgtgtatttctctgccgccggtcctaagtcaaaaacggatttataggtacgaaagccgaccgtattctgattgcctggcggaatttcacccgtttcaatcggaccaccttcagccgcgccccaaaacagccctttacgtgctgtccagcgactcttgggatcactatactctgcccagctttgtggcgtacttggcacgacatggttgttattcgcaccaataagttcagtcatcatgtaatcattgagacgcttcatctcctgacgatcggcaatgttgacccctttcgtcccttcaaccgcaatcgctttcaggtttttgctacccattattgcgccagttcccgcaccgccgctgtggttacggctattcaacatgccagagagaggaacaaggttttccccagcctgaccaatagccgccacacaggtttccggactggtcaatcgacaaatttcttccgtcgttgcgcgcgtcccttttccccataagaaatcggctttttccaggctaactttgtcatctttaatcttcagccataccggacttttcgccttcccttcgataataatgacgtcgtatccagcgaatttcatttgcgctgcaaaaaagccacccatatgggcatcgacgactaaatttcctttggtaaaagtagaaagactggtgatatttacgcgagaactacagggggcaccagatccagttaatgggccggtagcaaagactaatttattcgcttcatcgaaaggtttcgtgcctggcggtacttcgtcatacataattttgtagccgaagcccatgccaccgacaaaacttttaaacttactggaatcttcgagggtaatatttcctgtcgtgagattgactcttaatatattacctgtccaaccgttagccatgattttttcctttgcaagattcacacagtaatatctttccactcgataatttttaacgcccctgttgggcaggcgtttgcgcattcaccgcataacacacatttgctggattttttactttcggtatttacggtggccatcatccacgggcatgccgtagtacaggcgctacagccaatacagcgtttatgatcgacggtaatacagccttctttctgctgccaggtaatcgcaccaatcgggcagacgttcatgcattgcggctctttgcattgacggcaggtgtccgcggtatagttgagatcgccatacaggccgccgccagagccaaccccgttgtcgccaaagaaataattgcgatggattttgatacgggagaagaatgtccctacactgccatcgttgaagttggtacaagagatttcacagcggtggcaacccgtgcatcgcgctcgctgggtcaccagcacccctttgggggtatttatcaaccctactgtgccgctatcaatatcttcctgtttgcaacccaaaagactcagtaacgcaggggcaattgttagaccagcaaggccttttccacttatacgcaagaattctaatcgcgttaagccaatatctaatagtggacgatcaaccgggttcatttatttcgcatcctcttcgcaaacacagtgctgacaattcagcagcctgatattaagcattcaactaatacgctgctgactctgtccccaacaccagatattttccctaacccgatagtgtatgagaaaagattaacgccgataaactaatcctttatggttaggagaaaaaataatgtgattattctgagcccttaacattgatcgttatcaattaaaattacaaagcaagaaattataagtgaactgatatttattatcatttgaaataaatttaacttaagcgacaattatttgtgactttcattgcagaaaataaaaataacattatcgctataaattaaaatacataccgaaattcgtataatttcagcagttgttatttagaatgattaactggaccgcaactgaagcaagaatatcaggatgaagcttaccgcctcatcctgaatggtcattttaccagtgcgttaatgacggtttccatcgcctgcttttccagctcactgcgctgaatgcgtttattggctaatgctgtacgtaatacgcctgcgataacaatatgctttggttcctgccccagatcgcgcatttccagcacaactttaccgacaactctgcacatttctcggtacagttcatcctcttttgtccgatttcccattctttatacctatttatcatgccaactatcagcatatatcaatctaaccaattaaacaaaaatcaaacaaaatcagacaaataacgcgataaattattttaactgtagcaattgagcgatgatatatttatacaccggatgaactttcacttatcctcacactgacaacttcggcaccagacgttgcgcaaacagtgaagtttttgcgtaaccttttccctggaacgttaaatctttgataacaatttattgtctaacaagttgtatattttttgaaacgctgtttttgttttccttttggattaatttcagcgtataatgcgcgccaattgactcttgaatggtttcagcactttggactgtagaactcaacgactcaaaaacaggcactcacgttgggctgagacacaagcacacattcctctgcacgctttttcgatgtcacctatccttagagcgaggcaccaccactttcgtaataccggattcgctttccggcagtgcgcccagaaagcaagtttctcccatccttctcaacttaaagactaagactgtcatgaaaaagaccaaaattgtttgcaccatcggaccgaaaaccgaatctgaagagatgttagctaaaatgctggacgctggcatgaacgttatgcgtctgaacttctctcatggtgactatgcagaacacggtcagcgcattcagaatctgcgcaacgtgatgagcaaaactggtaaaaccgccgctatcctgcttgataccaaaggtccggaaatccgcaccatgaaactggaaggcggtaacgacgtttctctgaaagctggtcagacctttactttcaccactgataaatctgttatcggcaacagcgaaatggttgcggtaacgtatgaaggtttcactactgacctgtctgttggcaacaccgtactggttgacgatggtctgatcggtatggaagttaccgccattgaaggtaacaaagttatctgtaaagtgctgaacaacggtgacctgggcgaaaacaaaggtgtgaacctgcctggcgtttccattgctctgccagcactggctgaaaaagacaaacaggacctgatctttggttgcgaacaaggcgtagactttgttgctgcttcctttattcgtaagcgttctgacgttatcgaaatccgtgagcacctgaaagcgcacggcggcgaaaacatccacatcatctccaaaatcgaaaaccaggaaggcctcaacaacttcgacgaaatcctcgaagcctctgacggcatcatggttgcgcgtggcgacctgggtgtagaaatcccggtagaagaagttatcttcgcccagaagatgatgatcgaaaaatgtatccgtgcacgtaaagtcgttatcactgcgacccagatgctggattccatgatcaaaaacccacgcccgactcgcgcagaagccggtgacgttgcaaacgccatcctcgacggtactgacgcagtgatgctgtctggtgaatccgcaaaaggtaaatacccgctggaagcggtttctatcatggcgaccatctgcgaacgtaccgaccgcgtgatgaacagccgtctcgagttcaacaatgacaaccgtaaactgcgcattaccgaagcggtatgccgtggtgccgttgaaactgctgaaaaactggatgctccgctgatcgtggttgctactcagggcggtaaatctgctcgcgcagtacgtaaatacttcccggatgccaccatcctggcactgaccaccaacgaaaaaacggctcatcagttggtactgagcaaaggcgttgtgccgcagcttgttaaagagatcacttctactgatgatttctaccgtctgggtaaagaactggctctgcagagcggtctggcacacaaaggtgacgttgtagttatggtttctggtgcactggtaccgagcggcactactaacaccgcatctgttcacgtcctgtaatattgcttttgtgaattaatttgtatatcgaagcgccctgatgggcgctttttttatttaatcgataaccagaagcaataaaaaatcaaatcggatttcactatataatctcactttatctaagatgaatccgatggaagcatcctgttttctctcaatttttttatctaaaacccagcgttcgatgcttctttgagcgaacgatcaaaaataagtgccttcccatcaaaaaaatattctcaacataaaaaactttgtgtaatacttgtaacgctacatggagattaactcaatctagagggtattaataatgaaagctactaaactggtactgggcgcggtaatcctgggttctactctgctggcaggttgctccagcaacgctaaaatcgatcagctgtcttctgacgttcagactctgaacgctaaagttgaccagctgagcaacgacgtgaacgcaatgcgttccgacgttcaggctgctaaagatgacgcagctcgtgctaaccagcgtctggacaacatggctactaaataccgcaagtaatagtacctgtgaagtgaaaaatggcgcacattgtgcgccattttttttgtctgccgtttaccgttactgcgtcacgcgtaacatattcccttgctctggttcaccattctgcgcactctctacactaggcgcattgctggctgcgggagttgctccactgctcacgctaaccggataccctgcccgacgatacaacgctttatcgactaacttctgatctacagccttattgtctttaaattgcgtaaagcctgctggcagtgtgtatggcattgtctgaacgttctgctgttcttctgcgcttagtggtcgatgtacttcaacataacgcatcccgttaggctccacggaatatttcaccggttcgttgatcactttcaccggcgttcccgtccgcacgctggagaacaaggctttaatatccggtgcattcatgcgaatacacccactactgacgcgcaaaccgacgctgtccggcgcactggtaccatgaatgaggtattcgccattaccatgcgcgaggcgcagtgcgtaacgtcctagcgggttatttggtccggcaggaacgactggcggtaatttaatgccacgctccaggctacgctgacgaatgcctgccgtaggcgtccaggttgggttagggattttctgcccaacacgcgtttccatcaccggcgtttccagcccctgcaatccaatacctattggataaacctgcacaatattttctcccggcggataataataaaggcgcagctctgcaaggttaacgataatcccctgacgcggtgcatcaggtaataacagttgactaggaatagttatcgtcgtaccaggttttggcaccggggcgatagtgttattggcttcaaggatcaacattgccgcagtatcaaaacgtcgggcaatagcctgaaggtttttatccccttcttgcaccgtatacgtttgattttgcccaaccagtcggcttccggttggtggtagcggataatcaaccgcccaggcagcctggatggcgctaaaagcgccgataagcgtgagtgtaagcaaagacgcgcgtttcattgtaaacctcctgtatttgccggagactcacgctgaaacgtcggatggcgcttatgttcacctgaaaccaaaacactcctgtgcaggtcagtgtaaacattgaccatccggcaatgtgagccaaccggatgaaagctgtccttttagtttagctaagtgcagcggctttggcgcgaattgcgcgaatcatcgcttccagaccttgactacgagatggggtgagatgttgggtgagcgccattttttcaaaccacggacgcacatcgaaattgacaatatcctgcggcgtcatctgatcgtagagaataaagacgaccgcaataagccctttcacaatcgccgcatcgctgtcgccctgtaattcaataattccctgggcattctggcgcatgacaatccacacctgactctgacagccctgaatgctattttgtggacttctgtcttcgtcgcgtaattctggcagacgctggcccagctcaataatgtagagatatttctcttcccagttggcgcagcgtaaaaaattacgcagcaacttttctttatccggcaataaagccatagtgcctccctgttatcccagcaaacggtgaatacgttgcaggccggtcaccagacgatccacttcttcatgggtgttatacatggccaggctcgcccgacacatcgcagggacgttgtaataggccatcaatggcattgcgcagtgatgtccggtacgcacagcaatgccgtaattatcgagaaaactgccaacatcataggcgtggtgtttaccgagattaaaagcaataacgccaagcctgttttgtgggccatagagagtgagatccggtacagattccagctgacttagcgcataatgcatcagattctgttcatactcggctatgttattaagccccagcgcgctaacatactccagcgccgcgccaagaccaatgatgcccccggtattgggtgtaccggcttcaaaccgccatggtgctttggtccaggtagtgccttcactcaggctgacggtggcgatcatagaaccgcccccttcccacggcggcatctcctgcaacaaggcttctttcacataaagaatgccaattccggtggggccatacagtttatgcccggagaacacgtaaaagtcgcaatccagcgcctgaacatccaccggatgatgcatcaccgcctgagcgccatccaccagcacttttgcgccatgctggtgcgcaagcgtgatcatttccgccagtggattttctgtgccaagcacgttggagacatgagtaattgccagcaggcgagttttctcatcaaacagcgtaggcagcgtctccagttgcaacgtaccatcgggattgagcgggatcacacgcagctctgcgccaacgcgtgcgcaaagcatctgccagggaacaatgttagcgtggtgctccatctgactgatgatgatgttatcgcccgcccgcacgttgctgttgccccagctattggcgaccagattgatcccttccgtcgtgccgcggacgaacaccagctcttccgcgctacgggcattaataaacaggcttgcccgcttgcgcacgttctccattttctcggtcgcctgggcgcttaaggtatgaataccacgatgcaccgccgcgtagccatgacgataaaactcggcctcggcgtcaatcacctggctcggtttctgcgcactggcggcgctgtcgagataagccagcggcaaaccgtttacctcacggctaagcaccggaaagtcggcccgcactttgtcgacggaaaaaatcatcttgcacctcctggcagccgttgaccgattcgggccagcacctgctgtttaagcccctcatcacgcagtgcttccgtcagttcggcagcgaaggcgtaaatgatcatctgctgggcatcctgctgattgatcccgcggctgcgcagatagaatatctgttcatcatcaatacgccccaccgtcgcgccgtggctgcatttcacatcatctgcatagatttccagctgcggtttcgtatccacttccgccagtttgcccatcagcagattgttgttggtcatctgaccatccgttttgatggcgtgctgcgcgacgttgatcaaaccgttaaataccgcgcggcctttgtcgctgacgatagttttgtgcaactgtcggctgttacaaaaacctttattgtgttccagccaggtacgggtatcacacacctcgtttttcaccggcatcgccaggctattgatccgcagcgtgctgttttcgccattgagttgcgtactggtgttgtgtcgtaacactgcgccacccagcaggaaactgtggctaaatgcggtggcatcctcagccagcaacaaatcgttatgagcaaagtggtgactgagcgggttttcaaacgccagcttgatatgctgcaagtgggcattcgctgcgacgttgatagtgaaccgtgccccggtaaaatgacgagcatcattcaggctgacaaaatgttcgatcaccgttgcttcggcaccttccgccagatccagatgatgtcggtaatgggcagtgttcacctcttcacctgccacgccctgggtgatatgcattaacagcaatggctttgccggccgttgaccgcgcttcacggcgatatgcgtcacgctttgtgccaggctttccgtcaaatgcagaaacacttccgcctgaatagcgtcgggtaaaccctgacggtcgtcgttaatgctcacttcatatccgctgccttcagttgcatcgctcagtgcgggcacgtaacgcccatcgacaaacaccagccgcacggagtctaacgttaacgctaaggcatcacgctgctgtggggatatctctcccgcaatgctgacaaactggctattgatcagcccttccagcggcgtatatttccagttttcatgtttacgtgtcggcagtccggtacgcagcaattgttgtaaatgctgctgtgcttgcggggagcgttttgtcccttcagcttcaaacaagtgatgccactgttgcagcgcgttactgctgttcggtaagccagccataaccctgctcctccagttgtttgaccaacgtgaaatcgccggatttcacaattcgtccctgatatagcacatgaacgtaatcaggcttgatgtagtcgagaatgcgttggtagtgcgtaacaatgatgaaactgcgcttgccatcacgcaggctgttcacgccatcggcgaccacttttaatgcgtcaatatccagcccggagtcgctctcatcaagaatgcataactccggttccagcaccgccatttgcaaaatatcgttgcgctttttctcgccgccggaaaaaccaacgtttacgctacgggttaataaatcttccggcatcttcaggagagcgattttctcttccatcaaatcctgaaaatcaaagcggtcgagcgtttcctggccgcgatagctgcgcaccgcattaagtgccgtttgcaggaaaaactggttactgacacctggaatctccaccggatactggaaggccataaagatgccttcgcccgcgcgatcttccgggctcagcgcaagcaaatctttgcctttgaactcaaccgtgccgcccgtcacttcataatcttctcgcccggcaagcgttgcgcttaaggtacttttgccgctaccgtttggccccataatggcgtgaacttcgccgggatgaacgtcgaggcttaatccgcgcaggatagctttatcttccacgctgacgtgtaaatctttaatacttaacatgtttattccttatccgacgctgtgttcaagactgatggcgaggagtttttgtgcttcaacggcaaattccaacggcagctcgctgaacacgtctttgcagaaaccgttaacaatcatgctgatggcgtcttcttcgctgatcccgcgttgcaggcagtaaaacagttgatcttcaccaatacgacttgtcgttgcctcgtgttccagttgcgcactattgttacgacactcaacatacgggaaggtatgcgccccacaattagcgccaatcagcatactgtcgcactgagtgaaattgcgcgcattggttgccgtcggcatgattttcactaagccgcgataactgttctgactatgtccggcagagatccctttgctgataatggtgcttttggtgtttttaccgatgtggatcatcttggtgccggtatccgcttgctgatgaccgctggtcagcgccacactgtaaaactcaccaatggagttatcgccgcgcaaaatgcagctgggatatttccacgtaatcgcactcccggtttcactttgcgtccaactcattttgctgttttcgccttcgcacaaagcacgcttggtgacgaagttgagaataccgccggtgttgttatcgccaggaaaccagttttgtaccgtggaatatttcacctcggcgtttttatggatgatgacttccaccactgccgcgtgtaactgatagctgtcacgcaccggagcggaacagccttcaatgtagctgacgtagctgtcttcgtcggccaccagaatggtgcgctcaaactgcccggttttttctgcgttaatgcgaaaataggtggaaagttccatcgggcagcgcacgcctttaggcacataaataaacgtaccatcagaggctaccgccgcattaagcgcggcaaagaagttgtcattccccggcaccacggtgccgagatatttacgcaccagttccgggtgatcgtggatcgcctcaccaaaggaacagaaaataattccctgctccgccagtttttcgcgataagtagtggcaacgctaacactgtcgaaaatggcatccaccgccacctctttgccttcccgcacgggaacgcccaactgctcaaacgccgcctccacctctttacttaaaaaggcgttcgcgccagtttgctgcaccgcgccaggttcagacgcgcaagtgtcgtcacaattaccgcagcttggtgcactgtagtagctgtaatcctgataattcagcttgtcgtagtgcgctttcaaccagtgcggttcttccatctccagccatgcgcgataggcgtttagacgaaactccagcatccactccggctcattacgcttcgcgctaattgcgcgcaccacctcttcgtttatcccctttgccagctcatcggtggctaactgggtgaagaatccttctttataattcagcgggccgccggtccaggttttgacatcgtcagttgcttcagtattacgagacatagtaccgcttataccccaaagctttcgccacagccacattcattctgggctttagggttgtgaaatttgaatatctgattaagtccttcacgaacgaaatcgacttccgtgccatcaataaacggcatcgcttgcagcgggacaaacagcttcgcgccgtcgtgttcaaacagcagatcgtctttgtccggctcgctaacactgtcgagcacatagccaaagcccgcgcagcccgtttgcttcacgcctaagcgcacgccgaccatacccggctgctttgccaccagctcacggatgtgtatcgccgctgcgggtgtcagcgttaagccttgccaggcgaaatcttgtgggttaaaggttccactatgcatgtccatcgatttacctcacttcatcgctttcagcgtataacagcatgttagtgataatgattatcagttcaacccagcaaacgcaggggctttaccgtaaaacatgctttttgcctgcttttaataagcatagaccctgatgtgtgggttaacaggcacgctaagaattaggtatctcattgttagataatggttattatctaaggagcattaaggctgtgatgaaaaagaaaaagttgtattgaaaatgactatttaagagataggtaaaaaagtgcagcgttcagaaataagaaaacccttaagtctgtgcgacacaggcttaagggtttctaccccatccggcgcttatctccggcactctcagtggcttagctcttgaaggggcgataagaataatctcataaagctaacccgccgttttaacacaaactgcgattagtattatttttgaacaatatcaggcggtagataagcagtattaagaaggtcatcgaacctggacggaggttaatccaggtcgatttggcgaacttgcggcattaagtcaggatcaatgcacgcccagacgccaggcaaagtagatttcttcttttaattcagcagaagagagagtaagcaggtcagcaaattcaagttctagttgtttcagacgtttgagatattgggcaggactaagattgctctggtcacggcgtaaaaattcaatggccagctgggtgggatcaagttgagtagacatagcatcctcgcttttagacaagacctgcacagtataccaccgtttactgtgcagataatgaccaaaagcaatatgcgtcacacttttctggtgacaacgtcacaaaatggcggtcgtcaatcgactgctacagcacaaacgccctttctcatcgaagatttcaatctgccagacctggtgacggctaccgagatgcaacggtttgcatacgccgcgcacccgcccttctcgtgcgctgcggacgtggttagcattgatttccagaccaaccactttttgctcaccttcggtacataaataaccggcaacggaaccgatactttcggccagtaccacggatgctcctccatgcagcaacccgaaaggctgctttgtccggctgtctactggcattgtcgcttcaagggtgtcatcaccaatatgttcaaagcgaatatccaggaaccccaccatgtttccttcacccatagcattcagtgcttccagggtgattttccgtttccatatcatttaataatctccagtaaagcctgcacaggatggcgtacccccgtgccttcaacccgttttacctggctacggcaggaatatccggtcgccagacagcggttacgcggcagtcgctgcatagcctgatgccaggataactcatagatcccgaggctattttcatggtttttcgcttcatgtccgtaagtccctgccatgccgcagcaacccacgctgacattttccagtttcgcgccaaaacgggcaaatatcgcggcccattgtgctggcgcacccggcaaggcggtaacttcggtacagtgaccaaagaaataccaactttcaccgctgactgtagccactggctgactctcaagtgcgcttgccagccattcattcgccagtaagacgttaaactcgccacgctcctcgcccagcgccagtttatattcatcgcgataacaaagtaccagcgccggatcgacgcccaccattggcatacccagcttcgccatacggttgaggaaatccgccgtctttttcgccgtcttcgcaaaacgattaagaaaacctttaatatgctgggctttgccatttgggctaaatggcagtaacacaggctggaaacctaatttttcgaccagacggacaaaatccgccaccacttgcgcatcgtaatagctggtaaaggggtcctgcaccaccaacactgtgcgcgctttctgctctgcattgagagattcaagctgttccagcgtcatgtttgcgctgcgatgccccaccatttgttgttgtaggctggggacgctcagcagcggcaaatcaaccatgccgatatgtttttcgctgagtttgcgcaccagcggctggttaatgaagaagttaaaggttttcggcgcgcgtgccatcagcggcgcgtagctctcgaccgtagcgacgaggtggtcgcgcagcgggcgtaaataacgggtgtgatagagctgcagaaaacgagagcgaaactccggcacatcaattttgatggggcactgggtgctacacgctttacaggccagacagccgctcatcgcctctttgacttcgtgactgaagtcatattcgcctttattcgcatgccagctattgcgcgtgcgggcaattaacgtccgcaaactgacgccggattcaggcagttcttgttccagtttgagtggatcaacgccgcgatccgccaacaaacgcagccattcacgcaccagcgttgcgcgccctttcggactatgaatccggttctgggtgatcttcatgctcggacacatcggactacgggcatcaaagttgaagcataaaccgttgccgttacactccatcgcaccgcgccactgctggcgtaccgcaatggggatctgccgatcgaatgtaccgcgcttcaccgcgtccactttcatcatcggcgcatcgagaccttctggcgggcaaatcttccctgggttgagtcggttatgcgggtcaaatgccgctttcactttgcgcagttctgcaaaaagttcctcaccgaaaaacgccgggctgtattcagcgcgaaaacctttgccgtgctcgccccacaacaaaccaccgtatttcgcagtcagcgccaccacgtcatcagagatttgcttcatcaaaatctcttgttgaggatcgcacatatccagcgctggacggacgtgcaagacacctgcgtcgacgtgaccgaacataccgtagcttaagccgtggctgtcgagcagcgcgcgaaattcagcaatataatccgccaggtgttccggcggtacgcaggtatcctcagcaaacggaattggcttagcggcacctttggcattgccaagcagaccaacggcttttttgcgcattgcatagatacgttcaacccccgccagctcacggcacacctgccagccgatgacacctgcttgatgactggcgatcagctcatccaaccgcgcacagagtgcatttacccgctcatcaatcagcgcctcatcatcaccagcaaattccacaatgttcagcccgagcatctcttggtcaggcacatcggtaatcaactcgctgacggaatgccagacaatatcttcccgcgccagattcagcactttactgtccaccgtctctacgctaagcgcccgcgcctcaaccataaacggcgcgttacgcagcgcagagtcaaaagagtcatatttgacgttcaccagacggcgcactttaggcaagcgtgtaatatccagccgcgcttcggtaataaaggccagcgtcccttcactacccgtcagaatgcgcgtcaggtcgaactcggtcatctcatcgttaaagacatgacgcagatcgtaaccggtaagaaagcggttaagtttggggaagttgtcgataattaactggcgttgctgacggcaacgttgataaaccgtgttataaattcgcccgattgtggtattggatttacccagcgtttccgccaattcgacgggtaaaggttgcgtatcgagaatatcgccccccaacaacaccgcgcgtacgccaagtacgtgatcactcgttttgccatagaccaggcttccctgaccggatgcatcggtattgatcatcccaccgagcgttgcccggttgctggtgctaagttccggcgcaaaaaagtagccgaacggtttcaggtactgattgagttgatcttttatcaccccggcctcaacgcgcacccagccctcttcagggttaatttcgatgatgcggttcatatggcgggacatatcaacaataatcccctggttgagcgcctgaccgttagtgccggtgccgccgccgcggggggtaaagatcaggctactatagcgttcctgcgcggcaagacgggcgatcagcgccacatctgcggtactacgcggaaataccaccgcatcggggagaagttggtaaatactgttgtcggtgctcattgtcagacgatcggcataacttgtcgccgtatcgccggtaaaaccttgttgctccagctcttgcaaaaaattaagcaccagttgaacgacgccgggtgcctgggaaatctgtggaatcattatattgaccctttcctgcggtctgtgatgtaggtcgatacactattctttcaggctgctgcaatagcgcactgaaaggtgatgtttgtttactctatggatttcgtgttgcaggaaggcggcaagcgagtgaactccaggagcttacaatagtaagtgactggggtgaacgaacgtagccgcagcacatgcaacttgaaatacgacgagtaaatcgtttgcgtgttgcctgagttgttgtaccacatttttttctaacacgcccatcagaattaagggcagaatcggcctgttaaaaaccgctgaaattgctcatcattatgcaggtgagtttcgcgtgttcacgtcgcgtcgacgatttgacgcacaaaaaaggtgaaaagtagttatggtaaatgttcgtcagcccagggatgtcgcacaaattctgcttagcgtgctgtttttagccatcatgattgtggcatgtctgtggattgttcaaccctttattctcggctttgcatgggccggtacggtggttatcgccacctggccggtattgttacgtttgcaaaagatcatgtttggccgccgctctctcgccgttctggtgatgacgctgttattagtgatggtgtttatcatccctattgctttgctggttaacagtatcgtcgacggcagcggcccgctaattaaagccatttccagcggtgacatgacgttacccgatctggcgtggcttaataccattccggtgattggcgcgaagctgtatgcaggctggcacaacttgctggatatgggggggacggcgatcatggcgaaagtccgcccttatattggcaccaccaccacctggttcgttgggcaggcggcgcatatcgggcgctttatggtgcattgtgcgctgatgcttctcttcagtgccctgctgtactggcgcggtgaacaggtggcacaaggcattcgccattttgcaacccgtctggcaggcgttcgcggagatgccgccgtgctgctggcggcacaggctatccgcgcggtggcgctgggtgtggtggtgacggcgttagtacaggcagtgcttggcggtatcggcctcgccgtatccggcgtaccttatgcaacgttgctaacggtgttaatgatcctctcctgccttgtccagcttggcccgttgccggtactgattccggcgattatctggctctactggactggcgataccacctggggaacggtattgttagtgtggagcggtgtggttggcacgctggataacgtcatccgcccaatgttaattcgcatgggtgccgatttaccgctgatcctgattctctctggcgttattggtggtttgattgctttcgggatgatcggtctgtttattggtccggttctgttagccgtttcctggcgtctgtttgccgcgtgggtggaagaagtcccgccgccgacggaccaaccggaagaaattctcgaagaacttggcgaaatcgagaaaccgaataagtaatttctcatcaggcggctctgccgcctgattgttaaccaccgctaattgatatttgcttgctcttccccatattttcctgcttaccgccattcagctggtagtacctgtcgcaaattctttacagtttttaaactaatgagacgaatctgatcgacgcaaaaagtccgtatgcctactattagctcacggttataaatcaacatattgatttataagcatggaaatcccctgagtgaaacaacgaattgctgtgtgtagtctttgcccatctcccacgatgggcttttttttaacatttttccgcttcgctacctcgcccctcactctttccaataatgttgcacaagatactgtgactctcttcaagccgtcagcaggctgataatgttatttatattttattgtttatttcatgcagccattacacgatgaacgcttatgaactccaggcactccgccatatttttgccatgactattgatgaatgcgcgacctggattgcccagaccggtgacagtgaaagctggcgtcagtgggaaaatggcaagtgtgccattcctgatcgtgtagtcgagcaactgttggctatgcgtcagcaaagaaaaaaacatcttcatgccatcatagagaaaataaataaccgcatcggcaacaacaccatgcgttttttccccgacttaaccgcatttcaacgagtctaccctgatggcaattttattgactggaagatctatcaaagcgtagctgctgaattatatgcacacgatctggagcggctttgttaatttttccacagaaaggaattgtcgttgttacaacaataatgaacggatgctgacacaacatcgcttcactttttaaagcacctttgctaagtagaacctatgaaaaatccctatttccctaccgcacttgggttgtattttaattacctggtgcatggtatgggcgtccttttgatgagcctgaatatggccagcctggagacactttggcagactaatgccgcgggtgtcagcatagttatcagtagcctgggcattggtcgattaagtgtcttgctttttgcaggattattatccgatcgctttggtcgccgcccttttatcatgctcgggatgtgctgctatatggccttcttttttggcatcctgcagaccaataacatcattatcgcttatgtttttggctttctggcgggaatggcaaacagttttctcgatgcaggcacttatcccagtttgatggaagcttttccacgcagtcctgggacagccaatattttaattaaagcatttgtttccagcggacaatttttattaccgctaatcattagcctgttagtgtgggctgaactgtggttcggttggtcctttatgattgctgcaggcattatgtttattaacgctctgtttttataccgttgtacgttcccaccccatccgggtcgtcgcttacctgtcataaagaaaaccaccagctctacggaacatcgctgtagtattatcgatttagccagttataccttatatggctatatcagtatggcaacgttttatctggttagccagtggctggcacagtacggacaatttgttgcaggcatgagttacactatgagcatcaaactactcagtatctacaccgtgggtagcctgctttgtgtatttattaccgctccactcattcgtaataccgttcgcccaacaacattactgatgctgtacacctttatcagttttattgctctgtttaccgtctgcctgcatcccacattttatgtggtgataatatttgcttttgtcattggttttacctctgctggaggtgttgtgcaaattggcctgacgttaatggctgaacgtttcccttacgctaaaggtaaagctacagggatctattacagtgcgggcagtattgcgacctttactattccgttgattacggctcatctgtcccaaagaagtattgccgatattatgtggttcgataccgccatcgctgccatcggttttttactggcactgtttatcggcttacgcagccgcaaaaaaacgcggcatcacagcctaaaggaaaatgtcgctccgggtgggtaatgcaatattcttttcaggtcatgcaagatcttacggataaataactctttctgcgctaactaaggaaaatcgcgatcaaaaacaaactatgacatgcaatattcctggaaacataaactttatgccatgtacccagggaaaatcatcttcagtatagtaattatgtaaaccgtcggagaacaatacgtacggtaacgaaattatctttcagcaaggagctgtgaaaatgtctcaaaataaggctttcagcacgccatttatcctggctgttctttgtatttacttcagctacttcctgcacggcattagtgttattacgcttgcccaaaatatgagttctctggcggaaaagttttccactgacaacgcgggcattgcctacttaatttccggtatcggtttggggcgattgatcagtattttattcttcggtgtgatctccgataagtttggtcgtcgggcggtgatattaatggcagtaataatgtatctgctattcttctttggtattcccgcttgcccgaatttaactctcgcctacggtctggcagtgtgcgtaggtatcgctaacagtgcgctggatacgggtggctaccccgcgctcatggaatgctttccgaaagcctctggtagcgcggtcatactggttaaagcgatggtgagttttgggcaaatgttctacccaatgctggtgagctatatgttgctcaataatatctggtacggctatgggctgattattccgggtattctatttgtactgatcacgctgatgctgttgaaaagcaaattccccagccagttggtgggcgccagcgtaactaatgaattaccgcaaatgaacagcaaaccgttagtctggctggaaggtgttagtagcgtactgttcggtgtagccgcattcagcaccttttatgtgattgtggtgtggatgcccaaatatgcgatggcttttgctggtatgagtgaagctgaggcattaaaaaccatctcttattacagtatgggcagcttggtctgtgtctttatttttgccgcactactgaaaaaaatggtccggcccatctgggctaatgtatttaactctgcactggcaacaataacagcagccattatctacctgtacccttctccactggtgtgcaatgccggagcctttgttatcggtttcagtgcagctggcggcattttacagctcggcgttagcgtcatgagtgagttttttcccaaaagcaaagccaaagtcaccagtatttatatgatgatgggtggactggctaactttgttattccactgattaccggttatctgagcaacatcggcctgcaatatatcattgttctcgattttactttcgcgctgctggccctgattaccgcaattattgtttttatccgctattaccgcgttttcattattcctgaaaatgatgtgcggtttggcgagcgtaaattttgcacccggttaaacacaattaagcatagaggttaaaggagttaattatggatgttaccgcaaaatacgaattgattgggttgatggcctatcctatccgccacagtttaagccccgaaatgcagaataaagccttagaaaaagcgggattgccatttacctatatggccttcgaagtggataacgatagctttcctggagcaattgaaggattaaaagccctcaaaatgcgcggaactggtgtaagcatgccgaacaaacaactggcgtgtgaatatgttgatgaattaacaccagctgccaaactggtgggggccatcaacaccatcgttaatgatgatggctatctgcgtggctataacaccgacggcacgggccatattcgcgccattaaagagagcggttttgatatcaaaggcaaaacgatggtgctgttaggggccggtggtgccagtacggcaattggcgcgcagggggcaattgaaggtttaaaagaaattaaactctttaaccgtcgggatgagttcttcgataaagccctcgccttcgcgcagcgggttaatgaaaacaccgattgtgtcgtcacggtcaccgatctcgccgatcagcaagcctttgctgaagccctggcttccgccgacattttaaccaatggcacaaaagtgggtatgaaaccccttgagaatgaaagtttggttaatgatatcagtctgttacatccgggacttctggtcactgaatgcgtgtataacccgcatatgacgaagttattgcagcaggcgcaacaagctggttgcaaaacgattgatggatacggcatgttgttgtggcaaggggctgaacagttcacattatggactggcaaagatttccctctggaatatgttaaacaggtcatggggttcggtgcctgacaggctgaccgcgtgcagaaagggtaaaaaatgaaaaccgtaactgtaaaagatctcgtcattggtacgggcgcacctaaaatcatcgtcagcctgatggcgaaagatatcgccagcgtgaaatccgaagctctcgcctatcgtgaagcggactttgatattctggaatggcgtgtggaccactatgccgacctctccaatgtggagtctgtcatggcggcagcaaaaattctccgtgagaccatgccagaaaaaccgctgctgtttaccttccgcagtgccaaagaaggcggcgagcaggcgatttccaccgaggcttatattgcactcaatcgtgcagccatcgacagcggcctggttgatatgatcgatctggagttatttaccggtgatgatcaggttaaagaaaccgtcgcctacgcccacgcgcatgatgtgaaagtagtcatgtccaaccatgacttccataaaacgccggaagccgaagaaatcattgcccgtctgcgcaaaatgcaatccttcgacgccgatattcctaagattgcgctgatgccgcaaagtaccagcgatgtgctgacgttgcttgccgcgaccctggagatgcaggagcagtatgccgatcgtccaattatcacgatgagcatggcaaaaactggcgtaatttctcgtctggctggtgaagtatttggcagcgcggcaacttttggtgcggtaaaaaaagcgtctgcgccagggcaaatcagcgtaaatgatttgcgcacggtattaactattttacaccaggcataagcaataatatttcggcgggaacaccctccccgccgaactaaaaaatatattcaatcgtatttaataaaaatatttcgtgagtctctgtgcgctaattctccatttggcgtagggaaaatcacatctgaatcaggaattaacaatgaaacctgtaaaaccacctcgtattaatggacgagtgccggtcctgagcgcacaggaagcggtgaattatattcccgacgaagcaacactttgtgtgttaggcgctggcggcggtattctggaagccaccacgttaattactgctcttgctgataaatataaacagactcaaacaccacgtaatttaagcattattagtccaacagggcttggcgatcgcgccgaccgtggtattagtcctctggcgcaagaaggtctggtgaaatgggcattatgtggtcactggggacaaagcccgcgtatttctgaactcgcagaacaaaataaaattattgcttataactacccacaaggtgtacttacacaaaccttacgcgccgccgcagcccaccagcctggtattattagtgatattggcatcgggacatttgtcgatccacgccagcaaggcggcaaactgaatgaagtcactaaagaagacctgattaaactggtcgagtttgataacaaagaatatctctattacaaagcgattgcgccagatattgccttcattcgcgctaccacctgcgacagtgaaggctacgccacttttgaagatgaggtgatgtatctcgacgcattggttattgcccaggcggtgcacaataacggcggtattgtgatgatgcaggtgcagaaaatggttaagaaagccacgctgcatcctaaatctgtccgtattccgggttatctggtggatattgtggtggtcgatccggatcaaacccaactgtatggcggtgcaccggttaaccgctttatttctggtgacttcacccttgatgacagtaccaaacttagcctgcccctaaaccaacgtaaattagttgcgcggcgcgcattattcgaaatgcgtaaaggcgcggtggggaatgtcggcgtcggtattgctgacggcattggcctggtcgcccgagaagaaggttgtgctgatgactttattctgacggtagaaacaggtccgattggcggaattactagtcaggggatcgcctttggcgcgaacgtgaatacccgtgccattctggatatgacgtcccagtttgatttttatcacggtggcggtctggatgtttgttatttgagttttgctgaagtcgaccagcacggtaacgtcggcgtgcataaattcaatggtaaaatcatgggcaccggtggatttattgatatcagtgccactagcaagaaaatcattttctgcggcacattaactgcgggcagtttaaaaacagaaattaccgacggcaaattaaatatcgtccaggaaggacgggtgaagaaatttattcgggaactaccggaaattactttcagcggaaaaatcgctctcgagcgagggctggatgttcgttatatcactgagcgcgcagtattcacgctgaaagaagacggcctgcatttaatcgaaatcgcccctggcgtcgatttacaaaaagatattctcgacaaaatggatttcaccccagtgattagcccagaactcaaactgatggacgaaagattatttatcgatgcggcgatgggctttgtcctgcctgaagcggctcattaacaggagtataatgatggatttttctttaactgaagaacaagaactgctgctggccagtattcgcgaactgattacgactaactttccggaagagtatttccgcacctgcgatcaaaacgggacatatccgcgtgagtttatgcgggcgctggcggataacggtatttccatgcttggcgtgccggaagaatttggtggtatccctgcggattacgtcacccaaatgctggcgctgatggaagtgagtaaatgcggtgctccggcatttttaattaccaacggtcaatgtattcacagtatgcgccgtttcggttctgcagagcagctacgtaaaacggcagagagcaccctggaaacgggtgatcccgcctatgccctggcgttgacggaaccaggtgctggcagtgataacaacagtgccactaccacttacacgcgtaaaaacggcaaggtctacatcaacggacaaaaaacctttattaccggtgcgaaagagtacccgtatatgctggtgctggcgcgcgatccgcaaccgaaagatcccaaaaaagccttcaccctgtggtgggtcgactccagtaagcccggcattaagattaacccgctgcataaaatcggctggcatatgctcagcacctgcgaagtctatctcgacaacgtggaggttgaagagagcgacatggtgggcgaagaaggaatgggtttcctcaatgtgatgtacaactttgagatggagcgcctgatcaacgccgcgcgcagcaccggctttgccgaatgcgcctttgaagatgccgcccgctatgccaaccaacgtatcgcttttggtaagcccattggtcataaccagatgatccaggaaaaactggcgctgatggcgattaagatcgacaacatgcgcaacatggtgctgaaagtggcatggcaagccgatcagcatcagagtctgcgcaccagcgcggcgctggcaaaactgtactgtgcacgtaccgcaatggaagtcattgatgatgcgattcaaatcatgggcggtctgggctataccgatgaggcgcgcgtctcccgcttctggcgtgatgtccgttgtgaacgtatcggcggcggtacagacgaaattatgatttacgtagcaggtcggcagatcctgaaagactatcagaacaaataatctgcaggcggcgcagcttcttaacaaactgcgccgccagatttatccaacaagacttaccggttgaggaaattcagataggatttcttgttccgcaaaacagtttttaaattgtctacggtaatcgctggggctacaaccgacatggcgcaaaaacagtttggcaaagtgatcgacattttcataacccacacgccaggagatctctgcctgacttaattcagtattagtgagactccattttgcttccgtcatacgccgttgaataacatagttaataggggaaatacgatactctttggtaaattcatggcaaatataactgacgctggcacgaaattttttgcttaactgttctaaagtgattttttcgcgataattattattcagatagaaaagaatatcttttatcagaacatcttttttaatatacccctgctcgctacgataagcatttttaaaattttcgtagtaaagaatggctaacgtataggcaaatgcatcccataagctagatgtttggctatttttactttgcggcaaaatcacacttagctcattaaataaggtttttatgacttcttttccctgccccgcggcaattaccggacaagaatgcggttgcagtagctgattttcctcagccccctgaaactgaaagccgtacagcgcacaggtacacgtcgttgccggatcgttaacgtcagaggccaccgcatgcagcctgccgcgttctatcaccacaatgtcatccgcatgtgcgacatataagctagaatcgatggtaaaccttgcaacccctttcttgacgtaaatcaactcggtttcattgtcatgaacgtgatgtccggactcccattttggatcatcgctaaatgcaaaacgactaagccgtggcgttttaccggcgacaaacagcgtttcactggcgttatcaaaacagcgttgatacatgacaacctccctattccatgagcaagcaaaaacaatatatgccggataaaatacggcgtgtattgcggttatacaaccgcgtttagcgagagctaaacaagattatttacactgaatgcaagattgtacggtcatggaataactatattgccgcaaattgcacttttgttttagcgatcgcattttttttgcaagattgttggcaaggaaaacagcttgctccgtcgaaaaccccgcaccgctatcgcacactattttcaggccatttttaccttccatcggagatggttccgtatgcgactcacaggagaaatcatgaaaataataacctgctttaagctggtgcctgaagaacaggacattgttgtcactccagaatacaccctgaatttcgacaatgccgacgccaaaatcagccagttcgatctcaatgccattgaagctgcaagccagctcgcaacagatgacgatgagatagccgcgctgaccgttggcggcagtttgttgcagaacagcaaagtgcgcaaagacgtgctatcccgcgggccgcacagcctgtatttggtgcaggatgcgcaacttgaacatgcactgcctctcgataccgcaaaagcgctggcggcagcaattgaaaagatcggcttcgatttactgatctttggtgaaggttccggcgacctttatgcccagcaggttggcttgctggtcggagaaattctgcaacttccggtgattaatgcagtgagtgctattcagcgtcagggcaatacactggtgattgaacgcacgcttgaagatgatgttgaagttattgaactctctgttccagccgtgctctgcgtcacctccgatattaacgtgccacgcattcctagcatgaaagccattctcggcgcgggtaaaaaaccggtaaatcagtggcaggcaagtgatattgactggagccagagcgcgccacttgctgaactggtcggcattcgcgtaccgccgcaaacagaacgtaagcacatcattatcgataacgatagcccggaggccattgccgagctggcggaacatctgaagaaagccctgaactgaagcctacggagaagaaacgatgagtcaattaaacagcgtctgggtctttagcgataatcctgaacgttatgctgaactgtttggcggcgctcagcaatggggccaacaggtgtatgccattgtacaaaataccgaccaggcgcaggcagttatgccttatggtccaaaatgtctttatgttcttgcgcaaaacgacgcgctgcaacgcactgaaaattacgccgaaagcattgctgccctgctgaaagataaacaccccgctatgttgctgttggccgcgacgaaacgtggtaaagcgctggcagcacggttaagtgtgcaactgaatgcggcgctggtgaacgatgccacggcggtggatattgtcgatggtcacatttgcgccgaacaccggatgtatggcgggttagcgttcgctcaggaaaagatcaacagcccgctggcgatcattacccttgcacccggtgttcaggaaccgtgcaccagtgatacctctcatcagtgcccgacagaaacggtaccttatgttgctccgcgtcatgaaattctctgtcgcgaacgccgtgcgaaagccgcaagcagcgtggacctgagcaaagcaaaacgtgtggttggcgtcggtcgtggactggcggcgcaggatgacctaaaaatggtccacgaactggcggcggtgctgaatgctgaagtcggctgtagtcgtccaattgccgaaggcgagaactggatggagcgtgaacgttatatcggtgtctccggcgtgttgctgaaatccgatctctacctgacgctggggatctccgggcagatccagcatatggttggcggcaacggcgcaaaagtgattgtcgccatcaataaagataaaaatgcgccaatcttcaactatgccgactacggtctggtgggcgatatctacaaagtcgtccctgccctgattagccagttgagccgctaattcccctttcaaccacatctcccgctgtaaacgcagcgggaagggagcataacgcatgagcgatgacaaatttgatgccattgtggtcggtgcgggcgttgctggtagcgttgccgcactggtcatggcacgagccgggctggatgtcctggtgatagaacgcggcgacagtgccggatgtaaaaacatgaccggcgggcgtctttatgcccacacacttgaagcaatcattccaggctttgcagtaagtgcgccggtagaacgcaaggtcacacgcgagaaaatctccttcttaaccgaagaaagcgccgttaccctcgattttcaccgcgagcagccagatgttccgcaacacgcatcttataccgtattgcgtaatcgtctggacccgtggttgatggaacaagccgagcaggcgggcgcgcagtttatcccaggcgttcgcgtcgacgcgctggttcgtgaaggaaacaaggtcactggcgtgcaggctggggatgatattctcgaagcgaatgtggtgattctggctgatggcgttaacagcatgcttggccgcagcctgggaatggttcccgcttccgatccgcatcattacgctgttggtgttaaagaggttattggcctcacaccagaacagatcaacgatcgctttaatattacgggcgaggaaggtgccgcctggctgtttgccggttccccttctgacggcctgatgggcgggggatttctctataccaacaaggattccatatccttggggctggtttgtggattgggtgatatcgcccatgcgcaaaaaagcgtgccgcaaatgctggaagattttaaacaacaccccgccattcgcccgctgattagcggcggcaaactgcttgaatattccgcgcatatggtgccggaaggcggtctggcaatggtgccgcaactggttaacgagggcgtgatgatcgttggtgacgccgcaggcttctgcctgaatttgggttttacggtccgcggcatggatttagccattgcaagcgctcaggctgccgccacaacggtgatcgccgccaaagaacgcgcggatttctccgccagcagtctggcgcaatacaaacgtgagctggaacaaagctgcgtcatgcgtgatatgcagcattttcgcaagatcccggcgctgatggaaaacccgcgcctgtttagccaatacccacgaatggtagccgacatcatgaacgagatgttcaccatcgacggcaaaccaaaccagccggtacgaaaaatgatcatgggacatgcgaagaaaattgggctgatcaacttgctgaaagatggcattaagggagcaaccgcgctatgagccagaacgctacggttaacgtcgacatcaaattaggcgtcaataaattccatgttgatgagggccacccgcatatcattctggcggaaaatcccgatatcaatgaattccataaattaatgaaagcctgccctgccggactttataagcaggatgacgcaggaaacattcattttgattccgccggttgtctggagtgcggcacctgtcgggtgctgtgcggtaacactattctcgaacagtggcaatatcccgcaggcaccttcggtattgattttcgctacggctaatcatgcatcccacaggcccgcatctcgggcctgatgttctgtttcgagagtccaacatgaaagtgacattaacgtttaacgaacaacgtcgtgcggcgtatcgtcagcaagggttatggggcgatgctagcctggccgattactggcagcagaccgctcgtgcgatgccagacaaaattgccgtggtcgataatcatggtgcaagctacacctatagcgcgctcgatcacgccgcgagctgtctggcaaactggatgttagcgaagggtattgaaagtggcgatcgcatcgcatttcaactgcctggctggtgtgaatttaccgttatctatcttgcctgcctgaaaatcggtgcagtttccgtgccgctgttgccttcctggcgggaagcagaactggtgtgggtgctcaataagtgtcaggcaaaaatgttctttgcaccgacgttgtttaaacaaacgcgtccggtagatttaatcctgccgctgcaaaatcagcttccacaactacaacaaattgtcggcgtggacaaactggctcccgccacctcttccctcagtttaagtcagattatcgccgacaataccagtctgaccacggcgataacgacccacggcgatgaattagctgcggtgctgtttacctccggaaccgagggtctgccaaagggcgtgatgctaacgcataacaatattctcgccagtgagcgggcttattgcgcgcgactgaatctgacctggcaggatgtctttatgatgcctgcgccacttggtcacgcaacgggctttctgcatggcgtaacggcaccattcttaattggcgctcgcagcgtgttgttagatattttcactcctgatgcgtgtctcgcgctgcttgagcagcagcgttgcacctgtatgctcggcgcaacgccgtttgtctatgatcttttgaatgtactagagaaacaacccgcggaccttagtgcgctgcgtttctttctttgcggcggaaccacaatccccaaaaaagtggcgcgtgaatgccagcagcgcggcattaaattattaagtgtttatggttccacagaaagtagcccgcatgcggtggtgaatctcgatgatcctttgagccgctttatgcacaccgatggttacgctgccgcaggtgtagagattaaagtggtcgatgacgcacgcaagaccttaccgccaggttgcgaaggtgaagaagccagccgtggccccaatgtgtttatggggtattttgatgaacctgaattaaccgcccgtgccctggatgaagaaggctggtattacagcggcgatctctgccgtatggatgaggctggctatataaaaattaccggacgcaaaaaagatattattgtccgcggcggcgaaaatattagcagccgtgaagtggaagatattttattgcagcatcctaaaattcacgatgcctgtgtggttgcaatgtccgatgaacgtttaggtgaacgaagttgcgcttatgtcgtgctgaaagcgccgcatcatagtttaagcctggaagaggtagtggctttttttagccgtaaacgggtcgcaaaatataaatatcctgaacatatcgtggtaatcgaaaaactaccgcgaactaccagtggtaaaatacaaaagtttttgttaagaaaagatattatgcggcgtttaacgcaggatgtctgtgaagagattgaataagtttcatcttcggggatcacataaccccggcgactaaacgccgccggggatttattttatttcttcagttcagccaggcttaaccaggtttgcaccacggtgtccgggttcagagacaggctatcgatcccctcttccatcaaccatgcggcaaagtcttcgtggtcggacggaccctgaccgcaaatcccgacatatttgccctgtttcttcgcggcacggatagccatgctcagcagtgctttcaccgcatcgttgcgctcatcgaacaattcagacaccacgccggagtcacggtccagaccgagcgccagctgcgtcatatcgttactgccaatactgaagccgtcgaaatattcgaggaactgctcggccagcaaggcgttggacgggatttcacacatcatgatgattttcagcccgttctcgccacgtttcagcccctgacgcgccagttcttcaaccaccgctttcgcctgatctacggtacgcacgaacgggatcatgatctcaacgttggtcagtcccatgtcgttgcgcacacgtttcactgcttcacactccagcgcgaaacagtcgcggaagctgtcggaaacatagcggcccgcgccacggaagccgagcatcgggttctcttcatctggctcgtaacgctcaccaccgaccaggttggcatattcgttgcttttaaaatcagagagacggacaatgacgcgcttcggataaaacgcggcacccagcgtcgcgatcccttcagtcagacgaccaacgtaaaattcacgcggagaatcaaaacctttcatcatctcgcggatttcgttttgcaactgcggttcctgatcgtcaaactcaagcagtgcgcgtgggtggacgccaatcatacggttgatgataaattccagacgcgcaaggcccacgccttcgttcggtaggcaggcgaagtcgaaagcacggtccgggttaccgacgttcatcatcactttcaacggcagatccggcatcgtttctacgctggagcttttcacgctaaattccagcaactccgcatagacgtaaccggtatcaccttcggcacaagaaacagtgacgttctcaccgtctttcatccgttctgttgcatctccacagcccactaccgccggaatgcccagttcacgagcgatgatcgccgcgtgacaggtacgaccgccacggttggtgacgatggcagatgctttcttcatgatcggttcccagtccgggtcggtcatgtcagtaaccagcacgtcgccaggttcgatgcggttcatttcgctgatgtcatggatgactttcaccggacccgcaccgatgcgatgaccgatagcacggccttcggcgataatcttaccctgactatgcagcgtataacgctccatgacctgaccgcgactgcgcacggtttccggacgcgcctgcacaatgaacagtttaccggtgtggccatctttcgcccactcaatatccatcgggcgaccgtagtgtttctcaatttgtacggcctgttttgccagttcctgcacttcttcgttggtcaggctgaagatgtcacgctgttcctgcggtacgtcttcgattttaacctgcttgccgtgctcctgggtcggcgcgtaaaccatgcggatttttttgctccccatggtgcggcgcacgatagccgggcgattcgccgccagtgtcggtttatgcacgtaaaactcatccgggttaaccgcaccctgcacgaccatctcaccaaggccccatgcggaagtgataaacaccacctggtcaaagccggattcggtatcaatggagaacatcacgccagaacttgcgaggtcagagcgcaccatccgttgaacaccggcggagagcgccacaccacggtgatcgtaaccctggtgcacacgataagagatggcgcgatcgttaaacagagaagcaaatacatgtttcactgccacgagaacggcgtcaaaaccctgaacgttgaggaaggtttcctgctgaccggcaaaagaagcgtccggcatatcttctgcggtggcggaggagcgcaccgcaaaagaggcgttttcgtcatcggcggaaagctgtgcataggcttcgcggatggcgttttccagctcaggctggaagggagtgtcgataatccactggcggatttgcgcgcccgctttcgcaagctgagtaacatcgtcaatatccgttttatccagcagttcataaatgcgctggtttacgccgctttggtccagaaactggttaaacgcgtcggcggttgtggcgaaaccattcggaacggaaacacccattccggaaagattagtaatcatttcacccagggaggcatttttgcccccaaccctgtctacatcattcatgccgagttggttataccaaagcaccagcggactgctgccattgttggacatcgaacaatccttttgtgataaatgaacggtttgagaaacacatttctgcgcatttatctttgcatatttaaccggatgaaaaaaacggtgaatcgttcaagcaaatatatttttttactttttaagactgatcccagcgttgcgcaaatctgctctcttcgacaatttccacataaaccatcggtataaacgaaaccataaaaatgaaatgctgttttcataaaaaataaaattgaaggttcattttataaaccagacataacgttctacgcttctgtgcgtttttaatttatgctttcatagaattatgtctgcatcacgggaagaacaaaatggataatgctgttgatcgccacgttttttatatttctgatggtacggcaataactgcggaggtattaggacacgcagtaatgagtcaatttcccgtcactatcagcagcatcacgctgccgtttgtcgaaaatgagagccgtgcacgggcagtgaaggatcagattgacgcaatttatcaccagacaggcgtgcgcccgctggtcttctactccatcgtgttgccggagattcgcgccatcatcttgcaaagtgaaggcttttgccaggatatcgttcaggcgctggttgccccgctacaacaagagatgaaactggatccaacgccgattgctcatcgtacccatggccttaaccctaataatctcaataaatatgatgcgcgcattgcggcgattgattacaccctcgcccacgatgacggcattagcttgcgcaatctggaccaggctcaggtgatcctgctcggtgtttctcgctgtggtaaaacccccaccagtctgtatctggcaatgcagtttggtatccgcgcggcaaactacccctttattgccgacgatatggataatctggtgctacccgcgagcctcaaaccgcttcagcataaattgttcggcctgactatcgacccggaacgtctggcggcgattcgcgaggaacgtcgggagaacagtcgctatgccagccttcgtcagtgcaggatggaagtcgcggaagtggaagccttgtaccgtaaaaatcagatcccgtggattaacagtaccaattatagcgtagaagagattgccaccaagatcctcgatatcatgggccttagtcgccgaatgtactaaagaactagtgcattagcttatttttttgttatcatgctaaccacccggcgaggtgtgacacacctcgcacttgaaatcagcagcgattggtttatcgtgatgcgcatcacttcccggcagtcctgccgtagaagcaacaaatttctgagacttgtaatgaacagaactgacgaactccgtactgcgcgtattgagagcctggtaacgcccgccgaactcgcgctacggtatcccgtaacgcctggcgtcgccacccatgtcaccgactcccgccgcagaattgaaaaaatactgaatggtgaagataagcgactgttggtcattattggcccctgcagcatccacgatctcaccgctgcaatggagtacgccacccgtctgcagagcctgcgcaaccagtaccagagtcggctggaaatcgtaatgcgcacctattttgaaaaaccacgaactgttgtcggctggaaaggactaatctccgatccagatttaaacggcagctatcgggtaaatcacggtctggagctggcgcgcaaattacttttacaggtaaatgagctgggcgtcccaaccgcgaccgagttcctcgatatggtgaccggtcagtttattgctgatttaatcagttggggcgcgattggcgcacgtactaccgaaagtcagatccaccgcgaaatggctagcgcactctcctgtccggtaggttttaaaaatggtaccgatggcaatacgcggattgctgtggatgctatccgcgcagcccgcgccagccatatgttcctcagcccagacaaaaatggtcagatgaccatctatcagaccagcggcaacccgtatggccacattattatgcgtggcggcaaaaaaccgaattatcatgccgatgatatcgccgcagcctgcgatacgctgcacgagtttgatttacctgaacatctggtggtggatttcagccacggtaactgccagaagcagcaccgtcgccagttagaagtttgtgaggatatttgtcagcaaatccgcaatggctctacggcgattgctggaattatggcggaaagtttcctgcgcgaaggaacgcaaaaaatcgtcggcagtcagccgctcacttacggtcaatccattaccgacccgtgtctgggctgggaggataccgaacgcctggtcgaaaaactcgcctctgcggtagatacccgcttctgaatgcgtgcccattcctgacggaatgggcatttctgcgcaacttgttgtcttctcaacaaattactgcttgctctggtcagccataatattgataataagaatcattgttatatcaattattattaatttttatgcgttatacggatagcagaaaactcacgcctgaaacggatgccaatcacaagaccgcttccccgcagcctattcggcgaatttccagccagacactgttaggtccggatggcaaactgattatcgatcatgacgggcaagaatatctgctccgtaaaactcaggctggcaagctgctgttgaccaagtaacctttaactgctgcagctgacttccagccgtttaccccagtcaggtggacgactgacatagtcatcatctctgtcgctgaaaggatttcgcaacgcctcatgcaggcggtgcaattccgtcatatcacccttttctgccgcttcaatcgcccgttgcgccaaccagttgcgcaataccagagcggggttaacgctttgcatcagttgctgacgctcactatcgctaacctcgtcttgttgcaaacgcccccgataacgggcaaaccagtcatcaaatgccgcacgatcaataaactcatcacgtagcggactcgccgcgctgtgctgctcggtcagactcagcatgcggaatgtgcgggtataatcgctgcgctctcgcgccatcagactgaataattcattcagtagcgcgttatcctctttttgctccgtcatgaagcccagtttctgccgcatccgttctccataatgcgtcaacaaaacctgctgatagctgtccagggcctcattcagggcatctacggcaacaaatgggctcaatgtctgcgccagacgctgtaaattccacaacgcgacggcaggttgattatcaaagctgtaacgcccttgatgatcgctgtgattacaaataaaaccgggttcgtaatcatcaagaaaaccaaacggcccgtaatcaagcgtcagccccagcaggctcatgttgtcggtattcatcaccccatgagcaaagccgaccgtctgccattgggcaattaagctcgcggtacgtgcgacaacatcgctaaaccagagacggtatttgtcctcatcatctgcaagatgactccagtaatgacgaatagcaaagtcagctaactgacgaaccttttcgctctcgcggcggtagtaaaaatgttcgaaatgaccaaagcgcagatgacttggtgccacacgcatcagcatcgcgcctggctccgccgtttcccgatacactgggctatcgctggtgacgatacttaacgcgcgggtcgtcggaatgcccagataatgcatcgcctcactggcgagactttctcgtatcgtgctacgtaaaaccgcccgtccatcacccattcggctataaggcgtcaggccagcacctttcagatgccagtccattgtagtgccatcagcaagcagttgttcgccgagtaaaatgccgcgcccatcacccagttggcccgcccagacgccgaactgatgaccactgtaaacctgcgccagtggactcataccaggcagtagggcttcgccgccccagacacctgcgccatttttaaacaggctgcttggaatactcagcgtgttagccagttcggtattatgccaaatcagccgggcattatttaaaggcgtaggggaaagtgctgtataggtttctggcaattcatcgcgccagcgggtaacaaaagacagggtcatagatcctcctgtttgatagtgtagacggttactctcgtcttaaacaccagcaaacagaagggttatcgctgaaccaacgtcgttatctgatttatgggaacggcaggccacaggcatccctggagagcatggaaatcgaagggggtaatctgtgccaatatttctgccgtatcaatgcctcccgcaatgatgcaattgcaacaaggggaaatttgcgcctggatcgcacgaataaacggttcgaaggagcggtgcgtgatttgttgctgaataaaacttttatccagcatgacgcgggtgaaaagaccatcaaaaaccgctttcattgtgctattgcctgctcccaaattacctaacacaaggggatacacttggcttaaggataaaagaccgcgattatcttttccttcattgagatgcgggtaattctcattaatcaacagttcaataaacggatattttaatagttcgcctgcgtaattatccctctctaataataatgtagccacttgtggcgttaaattaagccaggcaaagagtttatgttgaataaaaaaatgttggcaactttttagtaattccaactgctcactaaataattgccaatgttgctcctcggtaagttgcgctataacccgactcgtcgggatacgaaccgtaccatcttcactggagaaatgggtaattaactcaacgccgacaaggacttgctggttgtctcttatcggcaggaaatagcaatcagaatgataaagattctccaaaaaaatcttcatggtaaccgtccctctcgaaggatgtttttcagtatccggctaaaagggatgaggccataagacataacaattacagaaggagtaactttcatttgttccatgttaaccactttttcaggggtcctttttttagattatcctgattataaacgaataatccatttacggaatttttgtctgcaaaatactactgtattcaggagtaaatggacggcgatgtatcatcgccgtccatttttcgacatattagattcgtctcgcctgccagaaatttttctgccaatagacattatcaagactggaacgcatcactcccttgctggtagaggcgtggataaattggttgttggtatcgtaaatacctacatgcaaaccattttgtccggaccccgttttgaaaaagaccaggtcacctggcagcaactcgtctttatcaatttgcgtgccaatagaggcttgttgtttggtttcacggggcagctgcaaatcgaaacgatcgcgcatcgtcacaaccacaaatccgctacagtccacaccgcgccgcgtcatgccaccataacgatacggcgtgccatgccagctttgtagctggtcgttcaaaccggcaataacggtaatgctatcagaaagtctggcatttggcggcggtgctttatggtggctacacccggccagaagcagtgctgtgatcaaaataaggcagaaacgcattccgtacggttcctctgttttttattcttgcattaatttagcgtcgtaattacccgattttcaagatactaatgaaatcagatggtgctaatcagcattctgtgaccttcgatatccagacggcgaaaattcatcccataggcctgcgccagatttggcggcgtgagcacctcttccctgcgtccactggccagcatttttccaccttttagcaaccacgcccgatgcgcatgacgcaatgtgtggttgagatcgtgactgctcatcacaatcgccagtccttgctgacacagcgcgctcagaattttgtctaacgcactttgttgcgcaacatcaagactgttcatcggctcatcaagaagcagcaattggcctgcgggattggcttgtggtgtgatttgcaacaccaccgcagcaagacgtacgcgttgccattcaccgccggaaagttgattggtgctacgtccgagtttgtcatcaagagccagcgcccctgcgacatcattcagtagttcggtacgcgttttatcgtgctgatgcagtgtcaggtagtgccagaccggcgttgcaaacggcggcgtctgctgttgactaagataggcgcgatgcagcgcgagttttgttgcggaccatgcttccagtggttgccccgcgaactgaatgcttcccttaccgctggtcattccggccattcgcgccagtaaggtactcttacccgcgccattcggccccaccaggtgcaggatctccccagcccgaacctcgccagaaagcggccccaggcgggtagattccgcaacatcttgtaactgcatcacaatagacattattttgccaacgccagtttaatgctttccatcacaatgggatcttccggcgtcatatccggggaaaaacgctggatgacttttccgtccctgccaaccaggaatttttcaaaattccataaaatatcatccgggtacagcggtgcacggcctttgctgaccatacgggcatagaatccgctctcttccggcgcgactgcggtcggcgctgcggcaatcaatttttgatacagcggatggcgtccttcgccattaacttcaatcttactgaacatcgggaacgtcaccccccatgtggtggtacagtaagttttaatctcttcatcgctgcccggttcttgttccagaaactggttgcacgggaatcccagcaccataaaacctcgatcgacccaggctttctgaatattctccaactgctcatattgcggcgttaagccacacttactggcgacattgacaatcaacagcacattaccggcgaacttctccagcgtggtcacttcaccgtcgatatctttcactacggtcgtcagaatggaatcttgcatcgtttctcctgggtgtggtcagtaaaaatcttagcttttaatcatagaccgtctttttgcggttaacgtcctgcttttaacaataaccagataaacaccggcgcacctaacgttgcggtgaccacgccaataggcagctctgcggcagctaatgccaggcgcgctacaatatcggccagcagcaatgcgctcgcccctgccagcgcgcagccgggaagtaatacgcgatgatcggttaaaccacacaaccggagaatatgggggatcaccagaccaataaagccgatagcacccgccagcgccacactgacgccaaccatccagccggtcgctgccaccagcacattgcgccagaaccacaggggtaaacccagttgccgcgcgctgatctcgccaagtgctaacatattcatcggcctggactgacaacagatccacaacaacacggggatcaatgccagcatcagccagctttgccgccagtctacgccgccaaaaccgcccatcatccagtacatcagctgacgcaaatcaacactggtggaaaagtagatagcccacgtcattagtgcgctacagataatccctaatgcaacgccagccagcaataaccgactggtgctaagatgacgacgggcgaaacgtaagagtattaaagtgatgataagcgcgccagcaatcgcacacagccctagcgcccagttggggagttgcccttgcccaagcaataccgcggcgataagccccacgcctgcgccgttagagacgccaagtagtccaggttctgccagaggattttcaaacaacgcctgcattacagcgccggatatagccagcgccgcaccaaccagcaatacagccagcgtacgtggcaggcgaatttgccagacgaacagttcgccacgaggagtaaaccagtcacctgggctgatccattgttcaccggcgcaaaggcttaagagaagcgccagcagcatcaaaacactcaggcataataaccagcgaatattttgtcgctgttgttggcgggcaagtgtcagcatggtatccgttctgctgaagtgtcatggcgttgattttacggtgactcttcgacagtgaaaagaaaaaaggccgcagagcggcctttttagttagatcagattactcgtctttggggctagcgttttcgacccggctttttaacttctgcccgggtctgaaggtcaccacgcgccgtgctgtaatgggaatatcctcgcccgttttcgggttacgtcccgggcgttgattcttatcacgcagatcgaagttaccaaaaccagagagtttcacctgttcgccgttttccagagcgcgacggatctcttcgaaaaacagttcaaccagttctttggcatcccgcttgctaagcccaagcttatcaaacagatattcactcatttcagcttttgtaagcgccataggttcaatccctcaaacttgcctggaatcgctcttttaatgcctctacacatttggcgacggtagcggcaatctcctcttcttcgagtgtacggctggtatcttgcaggatcaggcttatggcgaggctcttatacccctccgcaacacccttaccgcggtacacgtcaaataagtttacgccaactacctgatttacgccaactttcttacattcggataaaatatccgctgcgggaacgttttctgcgaccaccaccgcgatgtcacgacggttcgccgggaagcgagaaatctcgcgcgcctgaggcaccacgcggtctgcgagcttgttccactccagttcgaacaccagagtgcgaccgttaagatccagtttacgttccagttcaggatgaacaaccccaacaaaaccaatacgttcacctttcagataaatcgctgcggattgccccggatgcagtgccggattcgcttctgcacggaactcaacctcattcagtttaccggtcaggtcgagaacggattcaagatcgcctttcaaatcatagaaatcaacggtctcttttgccaggttccagtgctcttcgtaacggttaccgcaaatcacaccggctaacatcagatcctgacgaatgcccaacggtgcctgagtatctggtacgaaacgcagaccgctttcgaaaatgcgcacacggttctgctgacggttctggttgtacaccacggttgccagcaggccagtccacagagaaagacgcattgcactcatttcaacagagatcgggcttggcagcagtaaggcttcaacgcctggatggatcatctgctgcactttcggatcaacgaagctgtaggtgatcacttcctgatagcctttgtcgttgagcagcgttttcacgcgcttgaggctcaggtcagcttcacggtgagtacccataatcaggcttgcctgtaccggctcatccgggatgttgttgtagccgtaaacacgcgcgacttcttcaaccagatcttcttcaatctccatatcgaaacgccagctcggcgcaactgcctgccattcgtctttgccttcggtcacttcgcagccgagacgacgcagaatgtcagttacctgctcatccgcaatatgatggccgatcaggcgatccagtttgctacgacgtagagtgatggttgcacgcttcggcagcgttgcttcgttggtgatatcaattaccgggccagcctcaccaccgcagatgtcgatcagcagacgggtcgcacgttccatcgctttgtgctgcagtgccggatcaacgccacgctcataacggtgagacgcatcggtatgcaggccatgacgacgagcacgaccggtgatagacagcgggctaaagaacgcgcattccagcagcacgttttgtgtttcgtcattcacgccagagtgttcgccaccgaagatgccgcccatcgccagcgccttgttgtggtcggcgatgaccagagtgtcagcattcagcttcgcttcagtaccgtcgagcagcaccagcgtttcgccctctttcgccatccgcaccacaatgccgccttcaatgcgatctttatcgaaagcgtgcatcggctggcccagttcgagcagcacatagttggtgacgtcaacaactgcatcgatagaacggatcccgcaacgacgcagtttttctttcatccacagcggagttggcgctttaacgttaatgccttttaccacacggccaagataacgcgggcaggcttccggcgcttcgactgtaatcggcagcgtgtcgtcgatggtcgcaccaaccggaacgatttccggttgaaccagcggcagctggttcagcacggcaacgtcacgcgcaacaccaatgatgcctaagcagtcggcacggtttggcgtcacgctgatttcgatggtgttgtcatcaagtttcaggtattcacggatatcggtgccaatcggcgcatccgcaggcagttcgataatgccgctgtgatcgtcagaaatgcccagttcagagaaggagcacagcatcccttcagacggttcgccacgcagtttcgccgctttaattttgaaatcacccggcagaacagcaccaatggtcgctaccgctacacgcaggccctgacggcagtttggcgcaccgcagacgatgtccagcaggcgatcgccgccgacattcacttttgtcacacgcagtttgtcagcgttcggatgctgcgcacactcaaccacttcaccaacgaccacgccgtggaagctgccggcaaccggttctacaccgtcaacttccaggcccgccatagtgatttgatttgccagcgcatcgctatcaatcgccgggttcacccattcgcgtaaccacagttcactgaatttcataatctattcctgccttatttaaactgtttgaggaaacgcagatcgttttcgaagaaactacgcaggtcggtgacgccgtaacgcaacatagtcagacgctccatccccatcccgaaggcgaaaccagagtaaacttccgggtcgatgccaacgttacgcaacacgttcggatgcaccatcccgcagcccagcacttccagccatttaccgtttttacccatgacgtccacttctgcagaaggttcggtaaacgggaagtaggaaggacggaagcgaatctgcaaatcttcctcaaagaagttacgcaggaagtcgtgcagcgtgcctttcaggttggtaaagctgatgttggtatcaacaatcagaccttccatctgatggaacatcggcgtgtgagtctggtcgtagtcgttacgataaacacggccaggcgcgatgatacgaatcggtggctgctgggctttcatggtgcggatctgtacgccagaggtctgggtacgcagcaggcgggtagtgtcaaaccagaaagtgtcgtggtcagcgcgcgccgggtggtgaccaggaatgttcagagcatcgaagttatgataatcgtcttcgatttccggcccggttgccacggtaaagccaagctcaccgaagaaactttcgatacggtcgatggtacgggtaaccggatgcagaccgccgttttcaatgcgacgacctggcagagagacatcaatcgtttccgccgccagacgcgcattcagtgcagcgctttccagttccgctttacgcgcattcagcgcctgctgaacctgctctttcgcttcgttgataaccgcaccagctgccggacgctcttctggcggcagctcacgcagggtcgtcatctgaagggttaagtgcccttttttacccaaatattcgacgcgcacattatctaacgcggcaacatcactcgcctggctaatggccgccttcgcactggcaaccagttctgcgagatgactcatggttttcctcattgtgtcagtggtgacactggttcgttggacttagagcctatcccatcaggctattttacttgccattttggtcccgggctgtgctcgaaattctcacgtacttaaatacgctccggtttctccgcgctggccgtgtccagtctggctgcgacaattacacctgatgagacaggctttttatttttcaaaacgcgcatacaaaaaaagcctccactgggaggctttcaggcgctgttttccgtttctcttctcacgcgctagcctcctggattcaggtgctaaagtaaaaaaagaagcggaaaatagcagcattcattgcttgcgttaccttttggtactcttcaaaagacctttattgaaaaggctacggcgataaaagtcaatgttttgatggcgttgaaacgaaaagagggagactagctccctctttcaactggcttatgccagagctgctttcgctttttcaaccagagcggtgaacgctactttgtcgaatactgcgatatcagccaggatcttacggtcgatttcaacagaggcttttttcaggccattgatgaatttgctgtaagaaataccgttctgacgtgctgctgcgttgatacgcgcaatccacagttgacggaactgacgcttacgttgacgacggtcacggtaagcatactgaccagctttgataacagcctggaaggcaacgcggtatacgcgagaacgcgcaccgtagtagcctttagcttgtttcaaaattttcttgtgacgtgcacgtgcaataacaccacgttttacgcgagccatatgtgctctcctgtatctatattctaattaaaaagttaaaaacgttaacggcttatgcgtacggcaggcacgcgattaccaggcccagatcgcctttggaaaccatggctttcggacgcaggtgacgtttacgtttggtcgcttttttggtcagaatgtgacgcaggttagcgtgcttgtgcttaaaaccacctttaccggtttttttgaagcgcttagcagcaccgcgtacggtcttaatttttggcattttaataacttccacttcgcattgttaataaacgaaacaaaggcgaacaaagcctgtgaagcccgaaggctccacagacagtgctacttgaaggccttactgtttcttcttaggagcgagcaccatgatcatctggcggccttcgatcttcgttgggaaggattcgaccactgccagttcttgcaaatcgtctttcacgcgattaagcacttccataccgatttgctggtgcgccatctcacgaccgcggaaacgcagcgtgattttggctttatcaccctcttcgagaaagcgaatcaggctgcggagttttacctgatagtcgccttcatctgtaccaggacggaatttaatttccttaacctggataactttttgctttttcttctgttccttagaagacttgctcttttcatagaggaatttgccgtaatccattatacgacaaaccggcggctcggcgttagggctgatctcgactaagtctactccggcttcttctgctttctccagagcttctctcagactcacaataccaagctgctcgccttccagacctgttaagcgaacttcctgggcgcgaatttcgccattgatacggttagggcgcgccgtttgaactcgttttccgcctttaataccttattcctccaattgtttaagactgcggctgcgaatctcttgttgcagcttctcgatcacttcatttacgtccatgcttcccaggtctttaccacggcgggtgcgaacggtaactttgccactttccacctctttatcaccacagaccagcatatatgggacgcgacgcaaagtgtgctcgcggattttaaagccaatcttctcatttctcaagtctgctttaacacgaatgcccgcattacttagtttttgcgtcaattcgttaacgtattcagactgactatcggtaatattcatgataacaacctgaaccggcgcaagccaggtcgggaagaaaccagcgaactcttcggtcaggataccgatgaaacgttccatgctccccagaattgcgcggtgaatcattaccggtactttacgttcattgtcttcgcctacataagaagcgctcagacgagacggcaaagagaagtccagctgtactgtaccgcactgccatgcacgatcgaggcagtcatacagggtaaattcaattttcggaccgtagaaagcgccttcacccagttgatattcaaacgggatgttgttttcttccagcgcaaccgccaggtccgcctcagcacgatcccacatttcgtcgctgccaatacgtttttcaggacgagtggagagtttgacgacgatcttctcgaagccaaaagtgctgtacatatcatagactaaacggatacatccgttaacttcatcgcgaatttgttcttcagtacagaagatatgcgcgtcatcctgggtaaatccacgcacgcgcatcaggccatgcaggctaccactcggctcgttacggtggcagctaccaaactcggccatacgcagcggcagatcgcgataagacttcagcccctggttgaaaatttgtacgtgacccgggcagttcatcggcttaatgcagtattcacggttctcagaagatgtggtgaacattgcatctttgtagttgtcccagtgaccggttttttcccacaggacacggtccatcatgaacggacctttaacttcctgatactggtactctttcagtttagaacgaacaaacacttccagttcacggaagatggtccagccgtcgttgtgccagaataccatacccggcgcttcttcctgcatatggtacaggtcgagctgtttaccgattttacggtggtcgcgtttcgcggcttcttccaggcgctgcaggtaagcgttaagtgcttttttgtctgcccacgccgtaccgtaaatacgttgcaacattttgttgttgctgtcgccacgccagtaagcccctgccgttttcattagtttgaaatgatggcagaaacgcatgttcggtacgtgcggaccgcggcacatatcgacatattcttcatggaagtacagacctggcttgtcatcatgggcgatgttttcgtcaagaatggagactttgtagctctccccacggttggcgaaagtttcacgcgcttcgtgccagctgactttcttcttaatgacgtcgtagtttttctcagcaagctcatgcatccgcttctcgagtgcttcgacatcttcctgggttaacgtgcggtcaagatcaacgtcgtaataaaaaccgttgtcaataaccgggccgattgccattttggtatgcggccaaagttgtttaatcgcgtgccctaacaggtgcgcacaggagtgacgaatgatctccagaccttcttcgtctttggcggtaatgatgctcagttgtgcgtcgttttcaatcagatcgcaagcatcaaccagttcgccattaacgcgccctgcgatacaggctttcgccagacctggaccaatgtccagcgcaacatccatggggcttacagcgtgatcgtaatggcgttggctgccatcaggaagagttataacaggcattttatatccttatttgcagtggtgacccacacgaaagatcacatacaaagaaaaatttgtttattaacagttcattgcgaaaccatctagccaacaaatgctaaattggttcgcaatcaggtacacaaatgaaagacattaacctctcaccttccacccggttgagcgatgttaacactaaaaaaagggagattgtacctttccgtttcacattgattcgattcgcaattcgtttgtagtgagtacaccagcaaaacgcttaaagaacaactgataacatcacggtgcgtctgaaaggtttactgcgagcggatttacagcagcataaactgaatccagcaaagttcgttgcgtgatttggcggtagtattttaaacgctcatgagattaatgacgaagtggtcatatcacaatgataaaagtgacacaattcttataacaatttttcgtgcacatttcgttctggcgataataattaatcatcatcctcaaaacctccagatatatataaggcgaacagattatgagtcaaaacgatatcattatcagaactcattataagtctcctcatagattgcacatcgatagcgacataccaacaccttcatcagagcctattaatcaatttgcgcgccagctcatcaccctacttgatacctctgacttaagttcgatgctgtcatactgtgttactcaggaatttaccgcaaactgtcgaaaaatatcacaaaattgttattccactgccctttttaccattaactttgccacttcacccatccatacagaaaatatactcattacattacactataaaaaagaaatcatttccttattactggaaaccacgcctattaaagctaaccatttgcgaagcatactggattatattgaacaggaacagttaactgctgaagatcgtaaccattgtatgaaactgtctaaaaaaatccatagagaaaaaaactatacacccaacagtaaatctcaatggtagtgcatgttttttgcaatctccttctgacgctattttttgtcgccatctgtcattgcaatacgcccttgattcattgagaaatggaaaaggcaaagtcaacctgattaaacattactcctccgttgaatccatacagcagcatgtccccttagtccgggacgcggagttcagagcattacttcgccatcctcctgcagggagtcgcgttatcgcgagtaaggattttggcttcgctttagatattttcttttgtcgaatgatggcaaacaatgtcagtcatatgtccgcgattttatatatagacaatcatactttgtcagtaaggctacgaataaagcagtcagtgtatggacaattaaattatgttgtgtccgtttacgacccgaacgataccaacgttgccgtcagagacacccacaggacagcacggggctttctttcgcttgataagttcatcagttcaggtcccgatgctcagacctgggctgatagatatgttcgcaactgtgcaattgctattctgcccctattacctgtgggagttccaggggctattttcgcgggtattgcatcacgaatgccatttgcccctatacatccatcggcaatgttgttaataatggctacaggccagtctcaacagcttattacattattcaaacagttgcccatactccctgaaaaagaaatcattgaaataataactgcgcagaatagcgttggtacacctgctttatttttggctatgatgaacggacatactgacaacgtgaaaatatttatgcaagaaattcagtcactggtagataatcacatcattcatgaagataatctggttaaattactgcaaactaaaagtgctaacgaaacacctggactttatatctccatgttgtatggattcgatgaaataatcgatatctttctgaatgcattaaccactccaatagcacaagagcttttaaacaaaaaactggtgatgagtattttagccatgaaaatacatgatggtgagccaggattatacgccgcaatggaaaataatcaccctttgtgtgtcacacggttcctctctaaaattaatggcatcgcctttaaatacaagttgagcaaagctaacatcatggatttattaaaaggagctacagcacagggaacccctgcattatacatcgccatgagcaagggtaatgaagacgtcgtgttatcttatatatcgacgctgggtgcttttgcaaaaaaacattcttttagtcaacatcagttatttacactattggccgctaaaaatcatgacaacatgtcagctgttcatatagccattcatcataagcattataaaactgtagaaacatattatgctgctattaatgcaatcagccaaagcctgagttttagtgctgatgaaataaagacgtatttataaccagctatttacgatatatatcgatacataattttatttttttcataaaacgcagaaacagtgaccatgtgcacaacgccacccgacggctgtaataacaaaaaatcccttgatgcctgtcccttttgttacactccgttatcacgcacaagagatatgcaggacactggtatgccgactaaacgctttgataaaaaacactggaagatggtggtggtgctactggcaatctgtggcgctatgttgttgctacgttgggcagcaatgatttggggctgagcagtgacaaacgaagacagccagaccgcataacacggtccggcagataattttacatgctgtagcccaggcttaaggttgtccgacggtcggtatgttccggtgcagactctggaggttcagagttccatgtgacgttgtaagccaccttcagtccaaaatgttcattaatagcaacatttaatgcgctttcggagttcagcgttgtgtcttccgcgccaaagacgctaacaccctgcgtaaatttagcgttgtcagtcaactgccatgcataagccccggaggcatagcccagcggctgggtttcactggcattgtcggtatatttgtcgtaacgcacacctggaccgaattcaaagcggaaactgtgtaccgggccattcaaaaactgacgaccataacccgcggtcaacacatcgcgctctcgatagccgttataacggtctgtcagccagcttgcctgaccaaataaatagtcataatcagttaaattaaaacggctacgcccgcccgccgcatatttttcactagaacgctcatcattagaagaagtattactggcgttcccccacaggctccaggcagtggtgtgtccataccaggtcatggtggtgtcagccgtaagactggagcttttcgtattgccactttgtgcaagatatcctgcgttcagattaccttcgaaaggttttttagcgctggcaggatcatccatgacagtaaaaacggaatcatcggcagctgcattcagactcgcaaacatgccccccgccaacataacgatggcaggaactgtcttcaaaagcttcatttatcaagagtccgtacaacaaaaaaagagaccatcgcggtcccggaaactttcttaaggatcaaagattagcgtccctggaaaggtaacgaattataaaaaggcgcgaataacttagcaatgtattcttatttcattttttgaataagcatgtggcgaaaacagatttttatttatatatatttatctgcaaaattttaaataaagctccaataaatcatattgttaatttcttcactttccgctgattcggtgccagactgaaatcagcctataggaggaaatgatggtacgtatctatacgttgacacttgcgccctctctcgatagcgcaacaattaccccgcaaatttatcccgaaggaaaactgcgctgtaccgcaccggtgttcgaacccgggggcggcggcatcaacgtcgcccgcgccattgcccatcttggaggcagtgccacagcgatcttcccggcgggtggcgcgaccggcgaacacctggttagtctgttggcggatgaaaatgtccccgtcgctactgtagaagccaaagactggacccggcagaatttacacgtacatgtggaagcaagcggtgagcagtatcgttttgttatgccaggcgcggcattaaatgaagatgagtttcgccagcttgaagagcaagttctggaaattgaatccggggccatcctggtcataagcggaagcctgccgccaggtgtgaagctggaaaaattaacccaactgatttccgctgcgcaaaaacaagggatccgctgcatcgtcgacagttctggcgaagcgttaagtgcagcactggcaattggtaacatcgagttggttaagcctaaccaaaaagaactcagtgcgctggtgaatcgcgaactcacccagccggacgatgtccgcaaagccgcgcaggaaatcgttaatagcggcaaggccaaacgggttgtcgtttccctgggtccacaaggagcgctgggtgttgatagtgaaaactgtattcaggtggtgccaccaccggtgaaaagccagagtaccgttggcgctggtgacagcatggtcggcgcgatgacactgaaactggcagaaaatgcctctcttgaagagatggttcgttttggcgtagctgcggggagtgcagccacactcaatcagggaacacgtctgtgctcccatgacgatacgcaaaaaatttacgcttacctttcccgctaacaaaaacattcccccagcattgggggaatcatcaccaacctgtcggcaacgcgtttctccgactatgctcaaaagtcatgtgataacaaaggggtgaactatggccagtggcgatcttgtccgttatgtcataaccgtcatgttgcatgaggatacattgactgaaattaacgagttgaataattacctgactcgcgacggttttttgctcactatgacggatgatgagggaaatatccatgagctgggaactaacacttttggacttatcagtacccaaagtgaagaagaaattagagaactggttagcgggcttacccaaagtgcaaccggcaaagatcctgaaatcaccatcacgacctgggaggaatggaatagcaacagaaaataaatggtttttgggcaataatcagtctgtggtgtgcgttagctcgtgtttttacaccgcattcttgcgctaaccttatgatctggcagacaacatgggagagacatcatgtggcaggcaatcagtcgtcttttgagcgagcagttaggtgaaggcgaaatcgaactgcgtaatgaactgcctggcggagaagtccatgccgcatggcatttgcgctatgcaggacatgattttttcgtcaaatgtgatgaaagggaactgcttcccggttttaccgccgaagccgaccaactggagttactgagccgtagtaaaaccgtcaccgtgcctaaggtttgggcagttggcgctgaccgtgactacagttttctggtgatggattatctcccacctcgtccgctggatgcgcatagcgcatttattcttggtcagcaaattgcgcgtttacatcaatggagcgaccaaccacaatttggccttgatttcgataacgcgctctccacaactccacagcccaacacctggcaacgtcgctggagtacgttttttgctgaacaacggattggctggcagttggaactggctgcagaaaaagggatcgctttcggcaatatcgacgccatcgtcgagcatattcagcagcgtctggccagtcatcaaccgcagccttctctgttgcacggcgatttatggtccggcaactgtgcactgggtccggatggcccgtacattttcgacccggcctgctactggggtgaccgagagtgcgacctggcgatgttaccgctgcatactgaacagccgccacaaatctatgacggctatcagagtgtatccccgctacctgccgatttccttgaacgtcaaccggtttaccaactctacacgctgttaaatcgtgcaaggttatttggcggtcagcatttggttattgctcagcagagtttggatagattattagcagcatgatatgggttgaggataatggccgctccgtgcggccttttgattaaataaacccaagcagagaaaagaacacataacctgcagcaatacaaataaccggcaggatatacagactgaaaaactgcaggaaaatagtatggtgcggaacaacaatacgggactcaatttgttcacgcgttagcccctcttcccctttggctttttccagaatgagttgatcttcaacaccttcccgcaagaagcgcgcctggcgactcatccgggcaccggaatcctgcaacgccagtccgacaaaaatcaggatgaaaatcacccagaacataacgttcacgccaccattaaaattgggcgtcggggagttataccagaatagattcaaaaaaggcgtattcgcctgcatcatatcgatcatgacatgagtaaagtcgagcatgaccgcattaatgccttccttgttttcctgccgggtattcataaatttcagcaaagaaatcaatgtagagatcaatgcaggtataaaaatcacccaacccaaaatccttttcaaaacagcaatgcgtccagcttgttgatacgtcatgagttctccttgattaagacgcgtcgtttcacttagtttacctgtagatatctgttttcgcccattctttaaaggcgatatgataggcgcttaatcataagcacggcttaataccttacacataatgctctaaaggagaggttgtaatgagtaccccgcgtcagattcttgctgcaatttttgatatggatggattacttatcgacagtgaacctttatgggatcgagccgaactggatgtgatggcaagcctgggggtggatatctcccgtcgtaacgagctgccggacaccttaggtttacgcatcgatatggtggtcgatctttggtacgcccggcaaccgtggaatgggccaagccgtcaggaagtagtagaacgggttattgcccgtgccattagtctggttgaagagacacgtccattattaccaggcgtgcgcgaagccgttgcgttatgcaaagaacaaggtttattggtgggactggcctccgcgagtccactacatatgctggaaaaagtgttgaccatgtttgacttacgcgacagtttcgatgccctcgccagcgccgaaaaactgccttacagcaagccgcatccgcaagtatatctcgactgcgcagcaaaactgggcgttgaccctctgacctgcgtagcgctggaagatagcgtaaatggcatgatcgcctctaaagcagcccgcatgcgttccatcgtcgttcctgcgccagaagcgcaaaatgatccacgttttgtattagcagacgtcaaacttagtagcctgacagaactcaccgcaaaagaccttctcggttaatgaccaggggcagtgatctcgctgcccctggttctttatctgaaattgcattcaactgacggattaatcgtcaatttaagagaaagagttacaccgtcaccacttccgtgcactgtataaaaatcctatactgtacgtatcgacagtttagtgagttttatcatgacggcggaaggtcaccttctcttttctattgcttgtgcggtatttgccaaaaatgccgagctgacgcccgtgctggcacagggtgactggtggcatattgtcccttccgcaatcctgacgtgtttgttaccggacatcgatcacccaaagagctttcttgggcagcgattaaaatggataagtaaaccgatcgcccgcgcttttgggcatcgtggttttacccacagtctgctggcggtatttgcgctgctggcaaccttttaccttaaggttccggaaggctggttcattccggctgatgcgctacaaggaatggtgctgggttatttgagccacatacttgccgatatgctgacacccgccggtgttcccctgctctggccatgccgctggcgtttccgcttgcctatcctggttccccaaaagggcaaccaactggaacgttttatctgcatggcattatttgtctggagcgtatggatgccccatagtttacccgagaacagcgctgttcgttggagtagccaaatgatcaataccttgcagatccagtttcatcggcttattaagcatcaggttgaatactaaaaaggcaaaaatcacctttctggaataagcaattccatttgaatataagagccagctcacagttctgttaatcttgcgccaacactatgactgctacgcagtgatagaaataataagatcaggagaacggggatgaactttccattaattgcgaacatcgtggtgttcgttgtactgctgtttgcgctggctcagacccgccataaacagtggagtctggcgaaaaaagtgctggtgggtctggtgatgggtgtggtttttggccttgccctgcataccatttatggttctgacagccaggtacttaaagattctgtacagtggtttaacatcgttggtaacggctatgttcaactgctgcaaatgatcgttatgccgttagtcttcgcctctattctgagcgcggttgcccgtctgcataacgcatctcagttaggcaaaatcagttttctgaccatcggtacgcttttgtttaccacgctgattgcggcgctggtcggtgtgctggtcaccaacctgtttggtttgacggctgaaggtctggttcagggtggtgcagaaactgcacgtctgaacgccattgaaagtaactatgttggtaaagtctctgatctgagcgttccgcagctggtcttgtcctttatcccgaaaaacccgtttgccgatcttaccggagccaatccgacgagtattatcagcgtggtaatttttgccgcattcctcggcgtagctgcattgaaactgctgaaggatgatgcgccgaaaggtgaacgcgtcttagccgctatcgataccctacaaagctgggtgatgaaactggttcgcctggtcatgcagttgaccccttacggcgttctggctctaatgaccaaagtggttgcaggttctaacttgcaagacatcatcaaactgggaagtttcgttgtcgcgtcctacctcggtctgctgattatgtttgcagtgcatggcattctgctgggcattaatggcgtgagtccgctgaagtacttccgtaaggtatggcctgtgctgacgtttgcctttaccagccgttccagtgctgcgtctatcccactgaatgtggaagcacaaacgcgtcgtctgggcgttcctgaatccatcgccagtttcgccgcctctttcggtgcaaccattggtcagaacggctgcgccggtttgtatccggcaatgctggcggtgatggttgcgcctacggttggcattaacccgctggacccgatgtggattgcgacgctggtcggtattgttaccgttagttccgcaggcgttgccggtgtcggtggtggtgcaactttcgccgcactgattgtactgcctgcgatgggcctgccagtaaccctggtggcgctgttaatctccgttgaaccgcttatcgacatgggccgtacggcgttaaacgttagtggcagcatgacagctggcacgctgaccagccagtggctgaagcaaaccgataaagccattctggatagcgaagacgacgccgaactggcacaccattaattcttatgctggcaacggtccgttttgtataggggccgttgccttactttttaaatgttccatcgcggcgatgcatacactctcatatttaaacagatcgtcagcgaaaaaaatgtccaacttatcaatacattcctggctcaaactatgtgcctgtaggctgaagcttaaaacctcatacccgagacgttttctaagactactatctggaatactcataatatcttcaagcacaccacttcccattcccggaagatttagtggattaaaaagaagattgatattaagcatacttattatgctaggaaactttaggagactctcatttttttgaatcgcagcaaaaatgctcccgacaggatgtatataattttgttcatagtatatagtccttaaatagtgaataaccaacctgttttttatactgatcaaattggtcattttttctgggcgaaatacagaagtgacatccattccaataaaatctttatttatacctcttatccgaatttcactaccataaagattattaattattactctatatttaacattgtcctgcagatatgtatcaaaactaagtgctggcgctcctggcttactggcatcatagttaatgttagacatataggcaatcatataattaaagttactttctgctatttcatcgcagtcacattgacccgtacttataaagaaagtgagtgctgtcatagtagactgcagcctttctttaaaagagtcgaaagccaggcttttaatatttaaatcaccataattactctgtattaagtttgtagaaaacatctcccgcctcatattgttaacaaaattattatctcatttaaatctaagtcatttacaatataagtttaagagcgacgccacaggatgaactatcaaaaatagctcatcatgattagcaaaacttaaccattttaaaataaataaacaattaaagaaaaaagatcacttatttatagcaatagatcgtcaaaggcagctttttgttacaggtggtttgaatgaatgtagcaacgaaatacagaatttcaggtcatgtaactcccggcaaaaccgggaggtatgtaatccttactcagtcacttccccttcctggcggatctgatttgcccaacgttgggcagattcaggcacagtaaacgccggactgcgcagaaaactctctcccatcagtacaaacgcaacatatttgccacgcagcatccagacatcacgaaagctatccatctttatcgcatgttctggcggcgcgggttccgtgcgtgggacatagctaataatctggcggttttgctggcggagcggtttcttcattactggcttcactaaacgcatattaaaaatcagaaaaactgtagtttagccgatttagcccctgtacgtcccgctttgcgtgtatttcataacaccgtttccagaatagtctccgaagcgggatctggctggtggtctatagttagagagttttttgaccaaaacagcggccctttcagtaataaattaaggagacgagttcaatgagccaacataacgaaaagaacccacatcagcaccagagtccactacacgattccagcgaagcgaaaccggggatggacagtctggcacctgaggacggctctcatcgtccagcggctgaaccaacaccgccaggtgcacaacctaccgccccagggagcctgaaagcccctgatacgcgtaacgaaaaacttaattctctggaagacgtacgcaaaggcagtgaaaattatgcgctgaccactaatcagggcgtgcgcatcgccgacgatcaaaacagtctgcgtgccggtagccgtggtccaacgctgctggaagattttattctgcgcgagaaaatcacccactttgaccatgagcgcattccggaacgtattgttcatgcacgcggaagtgccgctcacggttatttccagccatataaaagcttaagcgatattaccaaagcggatttcctcagtgatccgaacaaaatcaccccagtatttgtacgtttctctaccgttcagggtggtgctggctctgctgataccgtgcgtgatatccgtggctttgccaccaagttctataccgaagagggtatttttgacctcgttggcaataacacgccaatcttctttatccaggatgcgcataaattccccgattttgttcatgcggtaaaaccagaaccgcactgggcaattccacaagggcaaagtgcccacgatactttctgggattatgtttctctgcaacctgaaactctgcacaacgtgatgtgggcgatgagcgatcgcggcatcccccgcagttaccgcaccatggaaggcttcggtattcacaccttccgcctgattaatgccgaagggaaggcaacgtttgtacgtttccactggaaaccactggcaggtaaagccagtctcgtttgggatgaagcacaaaaactcaccggacgtgacccggacttccaccgccgcgagttgtgggaagccattgaagcaggcgattttccggaatacgaactgggcttccagttgattcctgaagaagatgaattcaagttcgacttcgatcttctcgatccaaccaaacttatcccggaagaactggtgcccgttcagcgtgtcggcaaaatggtgctcaatcgcaacccggataacttctttgctgaaaacgaacaggcggctttccatcctgggcatatcgtgccgggactggacttcaccaacgatccgctgttgcagggacgtttgttctcctataccgatacacaaatcagtcgtcttggtgggccgaatttccatgagattccgattaaccgtccgacctgcccttaccataatttccagcgtgacggcatgcatcgcatggggatcgacactaacccggcgaattacgaaccgaacagcattaacgataactggccgcgcgaaacaccgccggggccgaaacgcggcggttttgaaagttaccaggagcgcgtggaaggcaataaagttcgcgagcgcagcccaagctttggcgaatattattcccatccgcgtctgttctggctaagtcagacgccatttgagcagcgccatattgtcgatggtttcagttttgagttaagcaaagtcgttcgtccgtatattcgtgagcgcgttgttgaccagctggcgcatattgatctcactctggcccaggcggtggcgaaaaatctcggtatcgaactgactgacgaccagctgaatatcaccccacctccggacgtcaacggtctgaaaaaggatccatccttaagtttgtacgccattcctgacggtgatgtgaaaggtcgcgtggtagcgattttacttaatgatgaagtgagaagcgcagaccttctggccattctcaaggcgctgaaggccaaaggcgttcatgccaaactgctctactcccgaatgggtgaagtgactgcggatgacggtacggtgttgcctatagccgctacctttgccggtgcacctagcctgacggtcgatgcggtcattgtcccttgcggcaatatcgcggatatcgctgacaacggcgatgccaactactacctgatggaagcctacaaacaccttaaaccgattgcgctggcgggtgacgcgcgcaagtttaaagcaacaatcaagatcgctgaccagggtgaagaagggattgtggaagctgacagcgctgacggtagttttatggatgaactgctaacgctgatggcagcacaccgcgtgtggagtcgcattcctaagattgacaaaattcctgcctgatgggaggcggcgcaattgcgccgcctcaaatgatttacatagtgcgctttgtttatgccggatgcggcgtgaacgccttatccggcctacaaaactgtgcaaattcaatatattgcaggaaacacgtaggcctgataagcgaagcgcatcaggcagttttgcgtttgtcagcagtctcaagcggcgcagttacgccgcctttgtaggaattaatcgccggatgcaaggttcacgccgcatctggcaaacatcctcacttacacatcccgataactccccaaccgataaccacgctgagcgatagcacctttcaagctcgcacttgtcaacacatccagctccgttaagcgtgggaaacagtaagcactctgacggatagtattatcgataaacgccggatgacacatcacctccaggctacgatcaccccgatggcctgcgtcatccagcacttgcaggaacaggctctcactgatctcttcaccgtagaatgcactgctgaatccctgggtagtgcgcaggttgaccggcaaatcaaacgccatctgacgatccgcccgcaacgcaatgccctgctctgccgcaaacctggcaacaatcgggaaaatctgcgggaacatatgcacatgatgatggctatcaagatgcgtaggtttgcgtccaaatagctcaatgaaacgcaaatactgactgacaagctcctgagtaatttcttccagcggtaaagcatcttcttctgccaactgccagatccattttcccagcacaccatcgcgggttaaccccggcatagctgtcagtggcttacccatagtaaggacaaagtgcatccctatggccagactcggttcatcacgactcaactgcaccgcatggtcaatagcctgcccattcaccagcgccgtcgtgctcgtgacaatcccattgcgacaggcctcgataatgccgtagttctgacctttgcttaagccaaaatcatcggcattaacaatcagtaagcgttccataatcagcctcggttaatgtgcttttttaagctctgcgatgcagtcggcaaagtttggcagccatttctcgtgcgccagaatcatctcgcgtgccagcagctcagcatcgcgatcggaatgcaccaacggactaaggtttagcgccagtaacacatcgttaaattctccgctaagtgcggcgttactggcagcaatctcgaagcctttaatggtgtgaatcagccccattactttatcatcgaaatgcgtaatgcgcggatgtggcgtcgcgccatcgcgccccagcttacaggtcatttctactgcccagtctgccggaatattatcaatctgcccatgatgcgggatattaacgtaatgttctgcttgcttgtcgttgtagatagcgttgatcacttcgcatgctgcatcagagtaataagccccaccgcgctgttccagttctttcggcttaactttcagctcaggatttttatacagctcaaaaagttgtttctcgactttctgtactacctgcgctcgtgcgccgcctttgtagtattcgcccatttcaatagccagcatctctttctgcttgaagtaatacagcagataagaacatggcagcagattcaagctacgaattaagccctcactaaatggcagatcgaaaatattttttacagaggacgcttttaactgcccactcgccacaccatcaagcaattcggcaaagcggctcttgccatttatcagcacatccttaatgaacaccatatggttgaggccgaacaaatcgatagataaatcatcgctgtctttcagcatcagaacatcgcgaataaacatcttcatgccgatcggaatattacacacgccgataaagcgtttaaatccggtatgacgataaacggcttcagtgaccattcccgccgggttagtgaagttaatcacccatgcattcggacaaagttcttcgacatcttttacgatgtcaaaaatcaccggaatggtacgcagacctttaaacaaaccgcccgcgccgttggtttcctgaccaagataaccatgacttaatggaatacgttcatccagttcacgcgccggtaattggccaacgcgcagttgggtagtaacgaaatcagcatctttcaatgcttcgcggcgatccagcgttttataaagcttcatcgggacgccagcgttatcaatcatccgttggcagagatcgaaaataatatccagtttcggtttaccaccttcgacatccaccagccataattcgctgaccggcaattcgtgataacgcttaataaatccttccagtaactccggggtatagctgctcccgccaccaatagtgacgacttttaatttctggctcataatttctcccttcagtacagaatactgatatctggcatatctgcccccccggacataaataatccagcaacaggacagatatgtgaattgtcaggtataacgacttactgattaaattcagtcaatttcttacgatagctcttaggcgtaaaggacgttaatttcttaaacgttttaataaacaaactcgggctactataaccggcctcaaacgcaatatccgtcacactatagttggtcatttccagttgttttttggcaaaattaatacggatttcattaataatctgcattggcgttttgccataatatcgttgagtcgctcgcgtcaaatattcctgacttttggcactcaacgccaccatattctccagcgcgctttcactaaactgctctttatcatgcatcttttctaccgtacttttcagccactgcggtacatcatcaatcacctgttcttcgcggtaatgacgtaaacggttaatgacataaaaagtaaccatctcaacaaactcttccagccctgtttcgcggaaattcaaactagaaatcactgtttccacataggtgagaaaagcgttattggtccggtatacctggctagcgacaaagcaataaggcaacaatggcaggtaatgctgctcaaaaaagcgtttactgatcccaacgttcaatatgcgcgtggcaccaaactcataaaaactttgatggtggctacctaacggaataaaaacaaaatcgccccgttccagtaacacgcgcttaccgttaatctcctggaaataacgcccggttaataccagagtaaattcataatagtcgtgctgatgcagtccgctgatactctcagttttgttatagataaacacatggaagtttttgccattaaacaactgctgttctcgggcagtggcaatttccggcgcgttaatcactggctgcatcatcgactccttatgccttcagtttttcatgaagctcaattaattcagtaatcagttcacgcgcaagcatggacgtcattaaatgatcctgagcgtggaccagcaccagactcactttcatcttaccttcgcccgcatcgccttcaatcagtttcgtctgtaccagatgcgcttcattcaatgccatccgactctgatccatcatggcttttgctgcggcaaaatcgccctgcttcgcctgtttcagtgccgcatacgccaggctgcgcgcttgtccggagttgatgatcagccccatcaccacttcttccagctcttcagcttccgtttgcgtatcgggaatgttatcgagatccatcatacatcgttcctctcttttcttaccggcacgattacccgtaccggcatcgattaaaatttcagggcgttagcgatatcttcttcgctctcttctttatcaatcgcattttgtgctttgttagccaccacaacaaagggcagataaattaacgttgcgatgccaaggttgaagagtgcgaccagcaatgcggcgacgctaccgttggtgttaaagaaggctcccagaccggttggcatggtccacggtgcaatattggtcaccggaggaataatgcccatgtagtacgctgcgagggtgattgccgccagaatcggttgtaccagtacaaacgggataaacatcaccgggttcatgataattggcagaccaaacagaatcggttcgttaatctggaagatgccggacggcagcgccagttttgccacctgacgataatcagcacggcgagaggcgataaagatagccaggatcaggcctaaagtcgcaccactgcccccaaggaaaataaaggagtccagcatcggcttggcccagatatggaaggtcttaccggctgccagcgccgcttcgacggaaccatattgctgataggtcgcgatattttccagtgcccacggcgtcataatgccgttgtccagtgcggtcagcgccagcgcgccatgaataccgaagaaccagagcagtggaacaaagatcacataggcccagcccaccacgctacccaagcttgccagtggggtactgatggtatccataatgatctgatggaagttggtgccccaggtattcaacgcccaggcaataatccccatcacggaaagaataataaagccgggaattaatgcgctgaaggaacggcttacactagcaggtacgctgtcgggcagtttaatgacccaattgcggcggacaataaaggtaaacatttctgccaccaccaggccaataataatcccggagatgatattcgccccacctaaccagtttgcaccaaccgcataggcctcaccgacactatatggggtgacggtcataaatgctgcaacggataacaacccagccgccagcgcatcgactttacgctcttctgccagcgccatgccaataaagaacggtgccattaaagacattattcctaatgttccgttatatacgttgccgccaatacctttcagaccattaagtgtttcaatggtactggcgtcgaggcgaatacctaaggaataaaaaaagctcccctccccaaagcttagaaaaacgttgttaattaatacaaacatggcccccgcaagggttaacggcattaagcgaataaagccatttttgattgcattaacgtgtggctgctttcctattttaactgcaaaagggaggagtaccttttcaaggcttgcaataacattactcatagaaaaatacccttaaaaaccgcaatttaaatattgcggtattgatttatgaaataactctttgacgggaaaatttaaaataaattaatttgctgcggcttttttaatcgctgcaaccgcagccttaagcacgcctaaaccatcgactttgccataaagcaggctgtcaattacttcaaccggtttgttgggtaacaaacgctggatttcgggcaacatataagcaatctgcggccctaataacacgacatcggcattctgacctttttcaccagccagtgtttccggaaatgcttcaataatgaccggaacttcatatttttctgcctgtgcgcgcattttacttaccagtaaagaggtagacatgcccgcagaacaaaacagataaatgtgtttcttttccataaaactgccctcatcgacgattatctgtcagccagacactccgcaagccttaacctgcttccatgctctgggtaacttgcgaaaccaacatgactttttttgtggctgaaaggagtatacggtatagacctgagcaatagtatttctttgaccttataaattgtttctccttgacctgtggttatgaccctcttcacatttcgggcaaataattcgcgaagataattaagaactcaggccaaaaaaaaccggcgcaatggccggtttccgttgttactcaagctttcagacgaattgattacttcgcagcctgtggatcagtgtcgtattcagcacaggtctgataaccggagttgatgacatatccggtatcatctaacgcgacaaagtaggtttctgctttaccatcacgttgacccaggatgtaggtctggcaagtaccgcgagcatggatcatgctcacttcagagctaggtttacccgcaatttgtgcaacctgcgcccggctcatgccttttttgacgtctttcaccacaggctgtacaaactggtctttggtacgatcataagccgtacaacccgccagcatggttaataccgccgctgcactcagaattcctgccatattcttgttcatattccgtcctcttgtttatcagcgtgttagataagcctggaatacattgggcgctttttcaagcccgtgaacgaaacggctccgctttcagaggattcctgtatgacgttttaaccaccattcagcccgctgtcgcttgtcgtttcagtagcaacgggttagctttaaggaagttttgtcttttctgtctggaggggttcaatgacattgcaacaacaaataataaaggcgctgggcgcaaaaccgcagattaatgctgaagaggaaattcgtcgtagtgtcgattttctgaaaagctacctgcaaacttatccgttcattaaaagtctggtgctcgggatcagcggcggtcaggactccacgcttgccggaaagctgtgccagatggcgattaatgagctgcgcctggaaaccggcaacgaaagtctgcaatttattgccgtacgcctgccctatggtgttcaggccgacgaacaagattgccaggatgccattgcctttattcaaccggatcgcgtattaaccgttaatatcaagggcgcggtattggccagcgaacaggcattgcgggaagcaggcattgaactgagcgattttgtccgtggcaatgaaaaagcgcgtgagcggatgaaagcacaatatagcattgcgggtatgaccagcggtgtcgtggtgggcaccgatcatgcagcagaagccattaccggattcttcactaaatatggtgacggcggtacggacattaatccgctgtatcgtctcaacaaacgtcagggtaaacagttactggcggcattagcttgcccggaacacctttataagaaagcgccaacggccgatctggaagatgatcgcccttctctgccagatgaagtggcactcggcgtgacctatgacaatatcgacgactatctggaagggaaaaacgtacctcaacaggtcgccagaacaatagagaactggtatctgaaaaccgaacataaacgccgtccgccaattaccgttttcgatgatttctggaaaaagtaataatttgcacatattggattgtgcgaaaaagagtaatttgttcacgccggatgcggcgtgaacgccttattcgacctataaaactatgcaaattcaatacattgcaggagtcgaataggcctgacaggcgtagcacgtcagacggtgtaacctttgtcatcgacccgcctcttttttaatcgcttcccgcctgttacactggatagataaccagcattcggagtcaacagtggtacggcgtttaacttctccgcggctcgaatttgaagctgcggcaatttatgaatatcccgaacatttacgtagtttccttaatgacttacccacccgaccaggggtgtatctgtttcatggtgaaagtgacaccatgccgctctatatcggcaaaagcgttaacatccgcagccgcgtcctttctcatttacgtaccccggatgaagccgccatgctacggcaatcccgacggatcagctggatatgtaccgccggtgaaatcggcgctctgctccttgaagcgcgattaatcaaagaacaacagccgctgtttaataaacggttgcgccgcaatcgccagctctgtgccctgcaattaaatgaaaagcgcgtcgatgtggtgtatgccaaagaggtggattttagtcgagcccccaacctgtttggcctgtttgccaataggcgcgcagctttgcaagcattgcagaccatcgctgatgaacaaaaactttgttatggcctgctgggactggaaccgttaagtcgcggtcgtgcatgttttcgtagtgcgctaaaacgttgcgccggagcatgctgcggtaaagagagccatgaggaacatgcgctacgcttgcgccagtctctggagcgtttgcgggtggtgtgttggccttggcaaggggcggtggcgctgaaagaacagcacccggaaatgactcaatatcatattattcaaaactggctgtggctgggggcggttaatagcctggaagaagcgacaacgttaattcggacacccgccgggtttgatcacgacggttataaaattctttgtaagccgctgctttccggtaactatgaaattactgaacttgatccggcgaatgaccagcgagccagttgattactgaacttgatccgggctatgaccagcgagccagttgatttcactgaacaacagtttaccttgcggttgtaaaagccgcagggtgtgcctgccatcgaaccagcacgcgccctggtcggtagtgagcaatttatcgcccagttgccacgccccgttaatcacaaacaccaccccgccgcgactgccaaaggtagtaaacgtacgttcggcaattctgactttcgccttacagacatccaggcgtgtcatgatgttgaaatccatgctcatctgccctgccgtcagtttcgcttttaccacctggtccgctgcaaaggcaaaaggctggaacggttttaaggtatggttaaagcggtctgcgctttcaaggagcatctcgccgccttccagcaacgtcactatcctttccatgccgggaaacaaagaaaactccccattcgccgcgatggatgcaatgctggcacgccagtaaaaatcacgttttgccggtgggaacgtgcaaatttcgcgcgtttcaccggcagcatttcgccacagattcacgctcattttacgcatatcaaagtattccatactcgctcccggcccgttcttttcattgttatcgttcaggtaaccgtggatggttatcggcaactcgggtgatttacgttagtggtgatcaggctttttttacaactgtttgagaagagaaaagaaaaccgccgatcctgtccaccgcattactgcaaggtagtggacaagaccggcggtcttaagttttttggctgaaagattattcagcagttgcaggcattttaccttttgccgctggacgttctgtcagacgcttctcaaaattagcattaaattgctttttctgttccggcgtcaggatgttgtaaattttgttctgggtttccatgtgcgccagcatgttagctttgcgctgttcttccatttttgcgatctgcgcttcagcttttactttatcgaaggtatcgctggcaatgatgtcatgcattgcgcggcgttcttccagcggcggacgtttcatctggtcacgctggcctttcatgatttcgcggatctgctgtttctgcgcgtcggtcaggttcaggtctttgaacatcatgtcctgatgcggaccgaacttgcctttgtggtgcatcatcggcttcgcgtcagccggtgctgcggtagtggtgtctgcggcatgggccaggttagccgcgccaagagccagggtagaggcaacaaacagtgcagttaatttacgcatattctatatccttcctttcagttatttattacggctttcttaagtagcgtgccgtgttgacgagattaactttactgactttagcgtcaattaatcagagcaacggtaaaacaatgaaagtgtaaaaaacacttttgcgccaattatggagaaaaaaagaaaatttgatggagagtgatgagagaatattacaacacgatgattttgcagagattatgaagaactataccggatgactggtgataaataaagcaaataaccaggattaatctgtattaatttataagaaagcaacttaatacccgcagaatgatttctgcgggtaagtattagcttattttttcgagcattaatcccgcgcgtaatcccaacgctaccaacggattagggaataacacatactctacatcatgggttacggtaaaacgttcctctccgtcctgcgccagcaatgttcctttctcaaacggcataaaattcagcgtgtcacttgccatatgcatttcgaaggacgggctgtggcgagtaatttggctaaccacccgataacggagcggcggtgttctcacgataccgacactctcaccagatagcagcgcagcaattgcgctggcagttactgcaaactggcgaagatcgttttgcccaaagggcaacgctttgccaagttccagcgtacaggccagcgcgccaaaatgtctggcgctgaaatgggtaaacgtaccaccaggttcctgatggaacaccagcgcctccagccccgccgcacccagccacgtcagaaatttctcgtcccagggaatgtcgcgttgcggtaatacaccgaactgcggatgcaaggagccacgaattgcggtatgtagatcaaggtgccagcgcacagattctttgccctggtcataaaaatcttccaggcactgttccagttcgcgcgcccgacaggtttctccgctttcagcaaatagctgccaacgaccgccaaacattcgattcatatcgctatggcaataacgtttcccttgcttcagcgcaggaggattcccgaggatcaccagcaaccgccaacgtaacgggatctcgccgtgagatatcgcgccaagcaacgcgtccagcatctccacaggtgccgtctcattaccgtgtattcccgcactaatcaccagtgcgccttgcggtggcgttaatggcgtcagttccagcacaccatcgcccagccagcgccagcgaacgccgttgatttctcgctcggtgataaccggttttttacccgttaaggtcagagcaagaaaattatccattgccccctccctcgcgctggaacggataaacgctaccgagattcagtaattggctcaatacatccagtgcttcccgcccttcgcgcagcaattgcgggtcggccagatcggcagcagtaaggcgatcgcggtagtaacgatccacccagtcattgagcgcattaaacagcgtatcgttcatcatcaccgccggattcaccgcccggcgttcttcttctgtcaataccacccgcaaccgcaggcacgccgggccgccgccattcgccatgctttcacgtaaatcaaagacttttagttcgctaatcgggttgtcagcggcaaggagttcattgagataaccccatactccggcgtgttcccgacactcctgaggcagcaccaacatcatggaaccatcatcgcggctcagcagttggctgttaaacagataggtagacaccgtatcagacacggaaacctgagttgccggaacttctatcgccataaaaccattgacccgcgcacgcaggtttgccagtaactgactctggcgagcgaacgcctgttggtggcaaaacagcacctggcggttactcacggcaatcacgtcattatgaaaaacgccctggtcgataacgtccgggttttgctgggcgaaaatcacctgttggggattcacctgattcagccttgccaccgcctcgctggcttcgcgagtctgtcgcgccggataacgggaaggccgggtatcattgccttcttctcgcccgtagacaaaaagttgcatacccggttcaccgtaatgaccgccgagacgattgtggtttgccgccccctcatcaccgagcaacgctacctgtggcaacgcgctatggacgctaaatttctcttcgtcgttaaaaatcgcttttaacaggctttcagtgacgggcgcttccaggctacggtgaaatttattgttcaggttggcaacggtgagatgcactttgccatccagcgtatcggcagatggcgcgatcgttgccgcattggctacccacattgggctagcggaactgacgctggaaagccagtgcggtgcctggcgtgcaactttttccagtacctgctcatcgctaccactgaatcccaactgacgcagcaccggaataaacggacgctcgtgcggcgggatcacggcctgggggaatcccgcatcggcaagggctttcattttcagtaagccctgcttcgccgccagtcgcgggttagacacctgaaaacggtgacgggtagaggcttcattaccaaagctcaggcccgcgtaatgatgcgtcagccctaccagcccgtcgaaattgacttcccaggcgttcatcgcaccacctcatcggaaaaatccagcccggggttaagcgtggcgggcaatgttaagctgtcgctctccaggctcgccatcggccatgcgcagtaatctgcggcataccaggcgctggggcgatggttaccggaagcaccaatgccgccgaatggcgcggtactggcagcaccggtaagcggtttgttccagttaacaatccccgcccgcgcctccagcaacagttgatcgaacttttcccgctcgggggaaaccagaccgcaagagagtccgaagcgagtgttattcgccattcgaatcgcttcatcgaaagtatcataacgccagacgcgcaataacggtccgaacacctcttcatctggtacgccagcaacgcctgtcatttcaatgatccccggcgtcagcaagcttgtccctgcttgtaataagcgcggcgcaagcaggggtcgtccgcccatcgcttccagttgctgccatgcagtaaccacctgctgtgcggcctgttcagaaatcagcccgccaataaacggctgcggttcgtcatcccagttgcccggcgttaatcgctggctgacggcaaccagacgagcaagaaacgcatcgccctgcgccccgcttttcagcaataaacggcgggcgcaggtgcagcgttgaccggctgtgacaaacgcgctctgaatggtcagatggacagccgcgtcgatatccgccacctcatcgataattagcggattattaccgcccatctcaagggcgagaattttctccggctgaccggagagctggcgatgcaactggtagcctgtattggcgctaccggtaaacagcaaaccgtcgagatcctccagcgcactcagcgcctgacccgtttcacgcccgccctgcaccaggttcagcacgcctggcggcaagccagcctgctgccataaacgcattaccgcttcgccactccacggtgtcagttcgctgggtttaaagataatggtgttacctgccagcaatgccggaacgatatgtccgttcggcaaatgaccagggaaattatacggcccaaacaccgccagcacgccgtgcgggcgatgtcgcaggctcgccgcgccgtccggcatttcactacgctgctcgccggtacgaacgtgatacgccttaatacttatcgcgattttattgatcatcgccgtcacttcggttgccgcttcccagcgcggcttacccgtttctctggcaataatcgcggttaattcggctttattgctttccagcagtgcggcaaagcgttcgacaacggcatgacgttcagcaaaactaagccgcgcccagcgcggaaacgccgcacgggctgcccgacaagcctgctcgacctgagcggcatcggcatcattgccttgccataacacctcgccgcttaccggattacgcttcacacggcttgcgccctggcccgttatccagtcaccgttaatccataaagtcatgctgttttctcctctgcgcacaggcgcaccagacgaacgcgatccccggcgtggcatttgagggcatccagttgtgcggcggttaaaatcaaacgctcggttgccggatcggtacgcaccagcaccacgcggaaatggtgataattttcattggcgaccaggcaggctgggaaatcgccctgcgcaggctgcccttctgccacttccaccagccgacttttacggatggcgcgcacgcggtcgatgtcacactcaagcgtcggcccaccgtcaaagatgtcgatatagttacggtagcgaaaaccttctttctccagcaccgcgcgggcaggcgcggtttgcggatgtacctgaccgatgacgtcctgggcttcctgggataaaaagtgggtatagatcggatgtttcggcatcagttctgcaataaatgccttttgcccggtgccgcagagaaaatcggcgcggctaaaatccatgctaaagaagcgtttaccgaggctttgccagaacggactatagccgtgttcgtcaatcaccccgcgcatttcagcaaccactttgtcattaaacttgtcgcgaaaagccgccataaacataaagcggcttttgctcagcaaatagccgttgccctctttgcgccagtccgggtcgagaaacagcgtgcacagctcgctgctgccggtgtgatcgttactgagaaacagcgtcggcaatgcgttatagacattcagctctttactggcgtgaaccaacgtgccgacgcgatagttgtaccagggatcgttcagcccaaccgccacctcaatggcacaaatccccgccacggtgcctgtctcgctatcttccagcacgaacacatagccctgctcacttttgggcagttcgccttgccaggttttgattgccctttcgatacgcgcgctaagcgtggcttcattggcgggaaggctcgtcaggccgccgcccgttttgctggcaagctgcatcagcgcgctgacatcacttcgctcaacgggacggatgaccatcatgatgaacctcggctaacaaattatttcaactactacctcggctaacaaagtgttcgcaagcagctgcaaagcgatccagtccggtcgtcacctcttcttcgctgacattgagcgcaggcgcaaaacgcaccacgttgccacccgcaatcagtaccatcacgcctgctttcgccgcttcctgagagatctgtttcgcttgcccggcgtaatcggcattcagtacacagccaatcagcaaacctaagccgcgaacttcactgaacaaaccatagcggtgattaatagtattaagacgctcaacaaaccagtcgtgacgctgtttaacgccattaagcatctctggtgtgttgatgagctccagcactttgcctgccaccgcgctggccagcggattaccgccataggtggtgccatgagtgccaacggtcatcacgcgggcgcactcttcggttgccaacaacgcaccgaccgggaaaccgccgcccagcgctttggcggtagttaacagatcaggcgtcacgccgtagtgcatataggcatacagttccccggtgcgcccgacgccggtttgtacttcatcaaaaatcaacagcgcattgtggcggttacacaattcacgcagaccttgtaaaaacgcgttgctggctggcaccacaccgccttccccctggatgggttcgacaatcaccgcacaggtagagtcgtcaatcagcgcgctggcagagttaatatcgttatatgcagcatgacgaatatccgccggcagtggcgcaaaatcctgactataggctggctgcccacccgcactgacagtaaacagcgtgcgaccatgaaacgcatttttgaacgccacgatgccgctcttatggctgccgtagcggtcgtgagcgaatttacgcgccagttttagcgccgcttcgttggcttccgcaccggagttacaaaagaagacgcgatcggcaaacgtggcgtcgatcaattttttcgccagtcgcagtaccggctcgttggtgtaaccgttgccggtatgccagaacttactcgcctgttcgttcagcgcttcacgcagttccggatgcgcatggcccagcgcgttcaccgcaatgccacccgcgaagtcgatatactctttcccctgctgatcccacaagcggctaccttcgccacgtaccggtataaagggtgccggagcgtaaacaggtatcatccattcatcaaagttttcacgcgtaattggctgagacatagcgacctctacagtaaataattcgttatttatatgttaataataagtaatgtttgcgctgtaaatgtagattgcagggttcgtgccagccagtgataaaagtgcataaacggcggaggctaactggaaatcaaggagttataaccaaaccatatgcatttaaagtgcatataaagtgaatacgtttgcgatgtgggtgaataaaaagaataaaaaacgcaatgttatgcagaagtaaaatataattctggaattgtgatcattgacgaaatttactggaaattactgcgccattctgacgcagcgcgcaccaaaagcgggcatttttttgcgccatcgttgacatcattaacaaccatcgatcaaatcacttaacaacaggcggtaagcaacgcgaaattctgctaccatccacgcactctttatctgaataaatggcagcgactatgaaatttgtctcttttaatatcaacggcctgcgcgccagacctcaccagcttgaagccatcgtcgaaaagcaccaaccggatgtgattggcctgcaggagacaaaagttcatgacgatatgtttccgctcgaagaggtggcgaagctcggctacaacgtgttttatcacgggcagaaaggccattatggcgtggcgctgctgaccaaagagacgccgattgccgtgcgtcgcggctttcccggtgacgacgaagaggcgcagcggcggattattatggcggaaatccccagtctgctgggtaatgtcaccgtgatcaacggttacttcccgcagggtgaaagccgcgaccatccgataaaattcccggcaaaagcgcagttttatcagaatctgcaaaactacctggaaaccgaactcaaacgtgataatccggtactgattatgggcgatatgaatatcagccctacagatctggatatcggcattggcgaagaaaaccgtaagcgctggctgcgtaccggtaaatgctctttcctgccggaagagcgcgaatggatggacaggctgatgagctgggggttggtcgataccttccgccatgcgaatccgcaaacagcagatcgtttcagttggtttgattaccgcagtaaaggttttgacgataaccgtggtctgcgcatcgacctgctgctcgccagccaaccgctggcagaatgttgcgtagaaaccggcatcgactatgaaatccgcagcatggaaaaaccgtccgatcacgcccccgtctgggcgaccttccgccgctaatttagcagctctcctggctcaaactgggtcaggagaattaaccttgagaaaaatcaacaaactgtcagtaatgatttgttgcctgccgtcctttgttataccgtctctgcgtttttagttgtctgaccacttctctattatcaagtttgatataggaaactccacgatgaacgctgagcgtaaatttctttttgcctgtcttatttttgcgctggtcatttacgctatccacgctttcggtttattcgatctgctcaccgatttaccccacttacagacactcatccgccagagcggatttttcggctatagcctctatattctgttattcatcattgccaccctcttgctgttaccaggaagcatactggtgatcgcgggaggaatagtttttggcccgctcttagggacactactcagtttaattgccgccacgctggcctccagctgcagtttcctgctggcgcgctggctgggacgtgatttactgctgaaatacgttggccatagcaataccttccaggccattgaaaaaggcattgcgcgtaacggtattgattttcttattctgacccgcttaatcccgttgtttccttacaatattcaaaattacgcttacggattaaccacaatcgccttctggccttatacccttattagcgcactcacgaccctacccggtattgttatttataccgtgatggcaagcgatctcgccaatgaaggcattacgctgcgctttattttacaactctgtctggcgggcctggcgctgtttattctcgtccagctcgcaaaactctacgcccgacacaaacatgtggatctgtctgctagccgccgcagcccacttactcacccaaaaaatgaaggataaaacgatgttgcaacattatagtgtgagttggaaaaaaggactggctgcactctgtttactggctgttgctgggcttagcggctgcgatcaacaagagaatgcggcggcaaaagtggaatacgacggacttagcaacagccaaccgctgcgtgtcgatgccaataaccatacggtaaccatgctggtgcaaattaatggtcgtttcctcaccgacgacactcgtcacggtattgtgtttaaagatggctccaacggacataaaagcctgtttatgggttatgcgaccccgaaagcattttatgaagccctgaaagaggcaggtggtacgccgggcgaaaacatgacgatggataataaagaaacgactcatgtcacaggcagcaaactggatattagcgtcaactggcaaggggcggcaaaagcgtattccttcgatgaagtgattgttgacagtaatggcaagaaactggacatgcgctttggcggtaatttaacggcagcagaagagaagaaaacgggttgcctggtgtgtctggatagctgcccggtcggcatcgtcagcaatgcaacatacacttatggtgcggttgaaaaacgtggtgaagttaaattcaaaggcaatgccagtgttctcccggcggataacacgctggcaacggttacctttaaaatcgccgaataaagccaggataaaggatgatgatgatgcaaagccgaaaaatctggtactaccgtataaccctcatcatcctgttgttcgctatgctgctggcatgggcgctgcttcccggcgtccatgagtttatcaatcgcagcgttgcggcgtttgccgccgtggaccaacagggtatagaacgctttattcagtcttacggcgcactggcggcagttgtcagcttcttgttgatgattttgcaggccattgctgcaccgctacctgcgtttttgatcacctttgccaatgcgagcctgtttggcgcgttctggggcggcttgctgagctggaccagtagcatggccggcgcggcgctgtgcttttttatcgccagagtgatgggccgcgaagtggtggaaaaattaaccggcaaaaccgtgcttgacagtatggacggctttttcactcgctacggcaaacacaccattctggtctgtcggttattgccttttgtccctttcgatccaatcagctatgctgccggtttgactagtatacgttttcgcagcttttttatcgccaccgggcttggtcagttaccggcaactattgtttattcctgggcgggcagcatgttaacaggcggtactttctggtttgtcaccggactgtttattctgtttgccctgaccgtggtgatttttatggcgaagaaaatatggcttgaacgccagaagaggaatgcctgatgggtttaccgccgcttagcaaaattcctttaattttacgtccacaggcgtggctgcatcgtcgccattacggcgaggtgctaagccccattcgctggtgggggcggatcccgtttatcttttatctggtgagcatgtttgttggctggctggagcgcaaacgcagtccgctcgatccggtagtacgaagccttgtcagcgcgcgcattgcgcaaatgtgcctgtgtgagttttgtgtggatatcaccagtatgaaagtcgccgagcgcaccggcagcagcgataaactgctggcagtggctgactggcggcaaagcccgctctttagcgatgaagaacggctggcgctggagtacgccgaagccgcaagcgtaacgccgccaacggtcgatgatgccctgcgtacccgactggctgcgcattttgacgctcaggcgctcaccgaactgacggcattgatcggcctgcaaaatctgagtgcccgttttaattctgccatggacattcccgctcaggggctgtgccgtattcctgaaaaacgttcttaaggagagatgatgcgccattgtgggtggttgctgggattgttaagcctgttttctctggcaacacatgccagtgactggcaagaaattaaaaatgaggccaaagggcaaaccgtctggtttaacgcctggggcggcgataccgcaattaaccgctatctcgactgggtgagcggcgagatgaaaacccattacgctataaacctgaagattgtccgtctggcggatgccgcagacgcggtgaagcgcattcagaccgaagccgcagccggacgtaaaacgggcggcagcgtggatctgctctgggtgaacggcgaaaacttccgcaccttaaaagaggccaatttattacaaacgggctgggcggagactctgcccaactggcgctatgtcgacacacagctgccggtgcgggaagatttttctgtgccgacacaaggtgcggaaagcccctggggcggcgcacaactgacgtttatcgcccgccgcgatgttacgccacagccaccacaaacgccgcaagccttactggagtttgctaaagccaatcccggcacggttacctatccgcgcccaccggactttaccggcacggcgtttcttgaacagttgctgattatgctgacgcccgatcccgccgcattaaaagaagcgccggacgatgcgactttcgcccgtgtcactgctcccttgtggcaatatcttgatgtgctgcatccgtatttgtggcgcgaaggaaaggatttcccgcctagtcccgcgcggatggatgctctgctgaaagccggcacattgcgcctgagcctgacctttaaccccgcgcatgcgcagcaaaaaatcgccagcggcgatttgcctgcaagcagttacagttttggctttcgcgaggggatgattggcaacgtgcatttcgtcaccattcctgccaacgcgaatgccagtgctgcggcgaaggtagttgccaatttcctgctcagtcccgatgcgcaactgcgtaaagcagatcccgctgtctggggcgatccttctgttctcgatccgcaaaaactgcctgacgggcagcgcgaaagtttgcaaagtagaatgccgcaggatctgccgccggtactggctgaaccgcacgcaggttgggtaaatgcgctggaacaagaatggctacaccgttacggtacgcattaatctttttgctgtgggcgatggtggcggtgatttatgcaccgctgatcccggcagctctcacgctgataagccctgctttgagcttgacacactggcaggcgttatttgccgatccacagttaccgcaggcattactggcaacgctggtgagcacaaccatcgcggcggtcggggcattgttgattgccctgctggtgattgtggcgctgtggcctgggccgaaatggcagcgtatgtgcgcccgtctgccgtggctgctcgccattccccatgtggcttttgccaccagcgcccttctgctctttgctgacggagggctgctttatgactatttcccgtatttcactccgccaatggaccgatttggcatcggtctgggcctcacccttgcagtgaaagaaagcgcatttctgctgtggatcttagcagcagtattgagcgaaaaatggctgttgcagcaggtcattgtgctggatagcctgggctacagccgctggcaatgcctgaactggctgctgttgccctccgtcgcgcctgcgctggcaatggcgatgctggcgattgttgcctggagcctgagcgtcgtggatgtggcaattattctcgggccaggtaatcccccgacgctggcggtaattagctggcagtggttaacccagggcgacattgaccaacaaacaaaaggcgcgcttgccagcctgctgttgatgctgttactcgccgcctacgttttgctgagctatctgctatggcgcagctggcggcgcactattccccgcgtagatggcgttcgcaagcctgccacgcctttattgccgggcaatacgctggcgatttttttacccttaaccggtgtgctgtgtgtggttctgctggcgatcctcgcggatcagagcacgatcaatagtgaagcgctcatcaacagcctgacaatggggctggtggcgacattcatcgctttgctcctgttactgctgtggctggaatgggggccacagcgtcgccagttgtggctatggttgcccattttattacctgctctgccactggtggcgggccagtacacgctggcgctatggctgaaactggatggaagctggacggcggtggtctgggggcatctgctgtgggtgatgccgtggatgctgtttatcctgcaacccgcctggcagcgcattgatagtcggttaattttgattgcgcaaacactgggctggagccgggccaaaatcttcttttacgtgaaatgcccactcatgttgcgccctgtgctgattgccttcgcggtgggatttgcagtcggtattgcgcagtatatgccaacgctgtggctgggcgcggggcgttttccgacgctcaccactgaggcggtggcattaagcagcggcggcagcaacggtattctcgccgcccaggctttatggcaactgctattaccgcttattatttttgccctgaccgcgttagtcgcaaaatgggtaggttatgtcagacaaggactccgctaatgctctgcgtgaaaaatgttagcctacgtttaccagaaagccgcttgctgacaaacgttaactttacggtggataaaggtgacattgtcacgttaatggggccgtctggctgtggaaaatccactctgtttagttggatgattggtgcactggccgaacagttttcttgtacaggtgagctatggctcaatgagcaacggattgacatcctacccaccgcacagcgtcagattggcattctttttcaggatgcactgttatttgaccagttcagtgtcgggcaaaatttactgctggcgctaccggcgacacttaaagggaatgcccgacgtaatgccgtgaatgatgcacttgagcgtagtggccttgagggagctttccatcaggatcctgccactttgtctggcggtcagcgagcgcgcgttgctctactacgcgcccttctcgcccaaccaaaagcgttactcctggatgagccattcagccgtcttgatgtggctctgcgcgataattttcgccagtgggtgttcagcgaagttcgcgccctggcgatccccgtcgttcaggtaacgcacgatctccaggatgttcctgctgatagttctgttctggatatggcgcagtggagtgaaaattacaacaaactgcgataacgcaaagtttttctcaatgcgtcagttcagaatggcgcactcaaaactacaatgtcgggattttcgatgaaacgtgtttctcaaatgaccgcgctggcaatggctttagggctggcttgcgcttctagctgggccgctgaactggcgaagcctcttacacttgaccagcttcaacaacaaaatggcaaagcgatagatactcgccccagcgcgttttataacggctggccacaaaccttaaatggcccttctggtcatgaacttgccgccttaaacctctctgccagctggcttgacaaaatgagcaccgaacagctcaacgcgtggatcaagcaacataacctgaaaaccgatgctccggtggcgctgtacggtaatgacaaagatgtcgacgccgtcaaaacgcgactgcaaaaagcaggtttaacgcatatctccatcctgagtgacgcgctaagcgaaccttcccgtctgcaaaaactgccgcattttgagcagctggtttatccgcaatggctgcacgacctgcaacaaggtaaagaggttacggcgaaacctgccggtgactggaaagtcattgaagcggcctggggcgctcctaagctttaccttatcagccatattcccggcgctgactacatcgataccaacgaagtggaaagtgaaccgctgtggaacaaagtttctgatgaacaactaaaagcgatgctggcaaaacacggcattcgccatgacaccacggtcattctgtatgggcgtgacgtatacgctgcagcgcgtgtggcgcagattatgctttatgctggtgtgaaagatgtgcgcctgctggatggcggctggcaaacctggtccgacgcgggactgcctgttgagcgcggaacgccaccgaaagtgaaagcggaaccggatttcggcgtgaagatcccggcacaaccgcagttgatgctcgatatggaacaggcccgtggactgctgcatcgccaggatgcaagcctggtgagcattcgtagctggccagaatttatcggtacgaccagcggttacagctatattaaaccaaaaggtgaaatagccggcgcacgttggggacacgctggtagcgacagcacgcatatggaagattttcataacccggatggcaccatgcgcagcgccgatgatattaccgctatgtggaaagcgtggaatatcaaaccagagcagcaagttagtttctactgcggcaccggctggcgcgcgtccgaaacctttatgtacgcacgcgccatgggttggaagaatgtttccgtgtatgacggcggctggtacgaatggagcagcgatccaaaaaatccggtagcaaccggtgaacgcggcccggacagtagcaaataacattgcaattactgacgctggaggctcttcagcgtcagatacccactccacacccgcgtaaaggtcgtcatccagcacaacgcaccgaagatccacgcaaaccacgcaaaccatgcagggaataaacatcccagcacaaacagtaagatcgtttctgtgccttcggttaatccccccagatagtaaaagctcttatgtgcataaccggggttatcaatctgatgttttgctgccagtgcagcaaaggcgagaaaactgctgcccgtgccgataaacgcaaacaacaaccagccgcctgccagcgcattttgctccggtgcagcaagaataaagccaaacggcaccagcgcgtaaaagagaaaatcgagagaaatatcaagaaagccgcccgcgtcggtaagctctctgcgccgcgccagcgcaccgtccagaccatcaagcagcctgttcaacaaaatgacgactagcgccgccagataccagcccagcgccagaaacggcagagccagcacgccgatggcaaatcccactaatgttaaaccatctggcgtaatgcccggtttatcaagaacccgcacgcactgatgcaacaacggtttaatccggggatgaagatggcggtctagcacaggcactccttaaatataaagcctttctgattgagcaacagtgcggatattatggcatttttcgcttatctgcccgtgtgtaatttatgaaaatgattgaagttgttgccgccatcattgaacgtgatggcaaaattttactcgcgcaacgccccgcccagagcgatcaggcgggattatgggagtttgccggtggtaaagtcgagccggatgaaagtcagcggcaggcgctggtgcgtgagttacgcgaagaactgggcatcgaagcaactgtgggtgaatatgttgccagccatcagcgagaagttagcgggcggattatccatcttcatgcctggcacgtacccgacttccacgggacgttacaggcacatgaacatcaggcgctggtctggtgcagtcctgaagaggcgctgcaatatccgctggcccctgctgacattccattattagaggcgtttatggctttacgcgccgccagaccagcggattaattatggctttacgcgccgccagaccagcggattagtgctaagggttttgtcatcacgctggcattgcagcagtattccttcggctttaattaccgccccttcagaataattttgatcctgataaacgcagcactgagtacagggctgcgcactctgcccgccactactgaacacttctggcggtacgtttacctccacgtccggacgataatgcgggttagccagtgcaattaatggaaatgctaatactacggcgaacaatgctcgactcacagggaactccttaacgttattgtctctgctactgataacggtagccgggtggcaaaactttagcgtctgagttatcgcatttggttatgagattactctcgttattaatttgctttcctgggtcatttttttcttgcttaccgtcacattcttgatggtatagtcgaaaactgcaaaagcacatgacataaacaacataagcacaatcgtattaatatataagggttttatatctatggatcagacatattctctggagagtttcctcaaccatgtccaaaagcgcgacccgaatcaaaccgagttcgcgcaagccgttcgtgaagtaatgaccacactctggccttttcttgaacaaaatccaaaatatcgccagatgagtttactggagcgtctggttgaaccggagcgcgtgatccagtttcgcgtggtatgggttgatgatcgcaaccagatacaggtcaaccgtgcatggcgtgtgcagttcagctctgccatcggcccgtacaaaggcggtatgcgcttccatccgagtgttaacctttccattctcaaattcctcggctttgaacaaaccttcaaaaatgccctgactactctgccgatgggcggtggtaaaggcggcagcgatttcgatccgaaaggaaaaagcgaaggtgaagtgatgcgtttttgccaggcgctgatgactgaactgtatcgccacctgggcgcggataccgacgttccggcaggtgatatcggggttggtggtcgtgaagtcggctttatggcggggatgatgaaaaagctctccaacaataccgcctgcgtcttcaccggtaagggccttagttttggcggcagtcttattcgcccggaagctaccggctacggtctggtttatttcacagaagcaatgctaaaacgccacggtatgggttttgaagggatgcgcgtttccgtttctggctccggcaacgtcgcccagtacgctatcgaaaaagcgatggaatttggtgctcgtgtgatcactgcgagtgactccagcggcactgtagttgatgaaagcggattcacgaaagagaaactggcacgtcttatcgaaatcaaagccagccgcgatggtcgagtggcagattacgccaaagaatttggtctggtctatctcgaaggccaacagccgtggtctctaccggttgatatcgccctgccttgcgccacccagaatgaactggatgttgacgccgcgcatcagcttatcgctaatggcgttaaagccgtcgccgaaggggcaaatatgccgaccaccatcgaagcgactgaactgttccagcaggcaggcgtactatttgcaccgggtaaagcggctaatgctggtggcgtcgctacaagcggcctggaaatggcacaaaacgctgcgcgcctgggctggaaagccgagaaagttgacgcacgtttgcatcacatcatgctggatatccaccatgcctgtgttgagcatggtggtgaaggtgagcaaaccaactacgtgcagggcgcgaacattgccggttttgtgaaggttgccgatgcgatgctggcgcagggtgtgatttaagttgtaaatgcctgatggcgctacgcttatcaggcctacaaatgggcacaattcattgcagttacgctctaatgtaggccgggcaagcgcagcgcccccggcaaaatttcaggcgtttaactgtatttaacggaacttgctccccacggaacatttcttatgggccaacggcatttcttactgtagtgctcccaaaactgcttgtcgtaacgataacacgcttcaagttcagcatccgttaactttctgcgatagcagcagatatgccagtaaagaaatcccatttgactatttttttgataatcttcttcgctttcgaacaactcgtgcgcctttcgagaagcaagcattatataatgccaggccagttcttcttcaattgtcccgttttgaaaagctgtgctacttatgctgatcatccaacttaattccgccgcccatattagcttcgcgctggatttaccggagctatgattagcgcaatcagagatatagtcactgggaaaaacagcaaatttattcaacaaggcgataacctgctctggggcttcctccatgtttgctttaaaggtattggctccatggtcgccagaaagaaaatgctccattaaggcacaataactttcgctatcttcgataccccattgatcctctaaagactcgcgtcttttacttatgatatcgatgctgtcaaaaggaagcacatgatattggaaggtatctttgccaggttcaggctttcgcggccagaactccagcgtttcagaccattgcttatgatagaatcgataaggtgcgatcaattgtagcgcctgtaacttctcgatactgagcggctcaatacctttagcctgataataatgcagttgttctttttttgctttaaaaccggcccgaacaataagccccatcataattaatagataaagaaaagagcatcccgcggtaatcaggcctctttcattcaaaccgttggatgttatcgctgcgaacacaaacattacagcgacaacacatgttaaataaaacccccacttacaaagcagcatggccttattttctttaatcatccgttcaaaattactattaaatatttcccagccattaaaagaatacttctcgctcccaggatggttttgtaataaaacttttttcatcacattccctgttattacatactttagaggcgataattttatccatgcaaaaaaaatatccaacgaattttcttgatccgctggatatttcagaatatgactcgaatagcacgaaagattcactcgcttacgctatcgccccgcttccgacttcatctgctggcggactttttttcgcactacgtttacgcggtgcagcctttttcttatcagcactgccaccactgcccggagccacaatgccgcgaaactgccgcaccggcgtacgtttggcttgatcaataagctgatatagcgtccccaccagcggctgcataaagtcctgatagcgacactgcttttcgctgatttgcgtcagcacgctttcccagtgcgcggtcatgtccggtcgcgtcgccatctccggcaggctatggaatagcgcttttccggcgtcggtggagtggatatagcgcccttttttggtcaggaaaccacgcttgaacaacagttcaataatcccggcacgcgttgcctctgtccccagaccatcggtcgcacggaggatctttttcagatctttatcctgcacaaagcgcgcgatcccggtcatcgcgctaagcagtgttgcatcggtaaaatggcgcggcggctgggtttgccgctctaccacttcacctttttcacacagcaactcatcgcctttcgccaccacaggcagtggcgtgccgtcgttttcttcatcgcgctctttgctgcctaacagcgtgcgccagcctgcttcagcaagaaaacgcgctttagcgacaaatttgcctttggcaatgtccagttcgataacacacttgcggaacaccgcatccgggcagaattgcatcagatactgacgggcaatcaggttatagaccttcgcttcgttctccgtcaggttgatcgcagaactccgtgcggtcggaatgatggcgtggtgcgcatcgacctttttgtcatcccaacagcggttgcgtatatctggatctaccactggctgcggcaacagatccggtgcatgaacactgatggcattcatcaccgcgtggcgtccggcaaaatgttcttctggcaaatagcgacaatcagaacgcggataagtgattagcttgtgcgtttcgtacagtttctggcagatatcaagcacgttctgcgcactcagaccaaaacgttttgccgcttcaatctgcaacgcactaaggctaaaaggcagcggcgcggattcactttcccgtttatcgttatagctggtgacaatagccggttgaccactaatgcggttaaccacatgctccgccagtggacgatgtaacaagcgcccttcttcatcctggtacggttcacacgcttcgctcggttgccagatagcggtaaaccgctcatcggcaggtgtcacgatatgtgctttgacttcaaagaagtctttcgccacgaagttttcaatctcttcatcgcggcgcaccaccagcccaagcacgggcgtctgcacgcgtcccacggaaagtacgccctgataaccggcattgcgaccgagaatggtatacgcacgggtcatattgatgccgtacagccagtcggcacgcgctcgcgccagcgcagaaacgcacagcggtacaaactcactgttggaacgaagacggtcgatcgcccgctcaaccgcctgcgggttcaggtcgtttatcaagcaacgctgtacctgctggcgcttttccggtgccagttgcagatagtccagcacttcatccaccagcaattgcccttcacgatccgggtccccggcgtgaacgatttcgctggcttcatgcaggaaccgtttgatgacgttaagttgtttggtcacggagggtcggggctgtaattgccacttttccgggacaatcggcaaatccgcaagattccagcgcgcatagcggctgtcgtaggcgtctggctgcgcctgctcaagcaggtgaccgatacaccaggtcaccacctgaccattaccgcactcgataaagccatcgcctttccggtgcggtttgggcaggacatcagcaatggcgcgcgccagactcggtttttcggcaataaacaaccgcattgaattaacgaatctcaaccatggcacgaccgccgcgcgctggcaccagttcgccaattgccgtcagttcaatgccaaactcggcggctgtagctttgacctcattttctgcttccggcatgaccgccagcagcaaaccgccagaagtttgcggatcacacagcagatcgcgcacttcacgcggcatttcacccatcagatgaccgtagctggcaaagttacgttcagtgccgccaggtactgcgcccaacttaatgtactcttcaacaccggggagtttcgggatcgcttcatagtcgacgcgtgcctgcacaccagccccctgacacatttcgctcaagtggcccagcagaccaaagcccgtaacgtcggtcatcgcttttacgccttcgatgttggcaaaggacgcgcctgcgatgttcatccggcacatcacttccgtcgccagtccctgatgttctggtttcaacagactttttttctcagccgtggtaagaacgccgatccccagcggtttcgtcaggaacagtttgcatccggcttgtgcggtactgtttttcttcacccgctcggtcggtacgatccccgttaccgccagaccaaaaatcggctccggcgcatcgatggagtgaccgccagccagcgcaatacccgcctgacgacatgcatagcgtccaccttcggtcacttcgcgggcaatttctggggaaagtttgttaatcggccagccgaggatcgcaatcgccataatcggtttgccccccatcgcgaagatatcgctgatggcgttagtcgccgcaatgcggccaaaatcgaaaggattatcaacgatcggcataaagaagtcggtggtactgataacgctggtgccattgcccagatcgtacaccgccgcatcgtcgcgggtttcattacccacaagcaaattcggatcaacaaacttcgcctgctcactatgcaggatggtttccaacacttttggggaaattttacagccgcaaccagctccgtggctgtattgggtcaaacgaatgctgttctcgctcatggacatctcctgtcaatgcaatccgggtatggtaaccctcattccgtgaagtgataagtgagagtgtctgaattcctgcgcctttgctcacaatccagacagtttcgcgacaattatcagaaataagttacaaacggcgtcgggtccgggacgttaatgctcgtagatgctttcagctgcggcgtaccgaggtagagaaaaccgacaattttatcctgctcacggcaaccgaatgcttcacgcactaccggactttcagttaatgcgccactgcgccagatgccgccaaacccctgggcaactgctgccatttgcatcgccatgaccgcgcatccggcagacatttcctgttcccagcgcgggactttatgattctcttcgcatttcgccaccaccgtgatgatgagcggtgcgcggaacggcgcattacgggctttgtcgatagctttgtcatcactaccggcagcaatcgccccctgttccagtacggcgctgaaacgctcgcgcccttccccttcaatcacaaaaaaatgccacggttgcatggacttatggtccggcgcacgcatacccgcacgcaggatgttttgcagttgttcacccgttggcgcgggttcagccaagcgggaggcgctacggcgattgatcaatagttcgagtgcatccatttgattaactcctgtcgtgatatttattcacaaaattaacacgagagtggattttgttacagcacagtccgcaattcctgctgacaagtaccggttgggtcattacgataaccacatctattgcgcctgtgacaggtgtgaccttaagttgggagaatacatgcgaaccctttggcgatttattgccggattttttaaatggacgtggcgtctgctgaatttcgtccgtgaaatggtacttaacctgttctttattttcctcgtactggttggtgtggggatttggatgcaggtcagtggtggtgatagcaaagaaacggccagtcgtggcgcactgctgctggacatttctggtgtgatcgtcgataaacccgacagttctcagcggtttagtaaattaagccgccagctgcttggtgccagttccgatcgtctgcaggaaaacagtctgtttgatatcgtcaacactattcgccaggcgaaggacgaccgcaatatcaccggtattgtgatggatctgaaaaacttcgcaggcggcgaccaaccgtctatgcagtacatcggcaaagctctgaaagagtttcgtgacagcgggaaaccggtttatgccgttggcgagaactacagccaggggcaatattatctcgccagtttcgccaataaaatttggctgtctccgcaaggcgtggttgatctgcacggctttgccaccaacggtctgtactacaaaagcttgctggataagctgaaagtttccacccatgtgttccgcgtgggtacgtataaatctgccgttgaaccgtttattcgtgatgatatgagtccggcagcccgcgaagctgacagccgctggattggtgagctgtggcaaaactatctgaatactgttgccgctaaccggcagatccctgctgagcaggtattccctggcgcgcaagggttgcttgagggtttaaccaaaaccggtggcgataccgcgaaatatgcactggaaaacaagctggtcgatgcactggcaagcagtgcggaaatcgaaaaagcactgaccaaagaattcggctggagtaagactgataaaaattatcgcgccatcagttattacgattacgcattgaaaacgccggcagataccggtgacagcatcggtgtcgtctttgctaatggcgcaattatggatggcgaggaaactcaggggaatgttggcggtgataccactgcggcacaaatccgcgacgctcgccttgacccgaaagtgaaagcgattgtcctgcgtgttaatagcccaggcggcagcgttaccgcgtctgaagtgattcgcgctgaactggcagcagcccgggcagcgggtaagcctgtggttgtaagcatgggcggcatggcggcatctggtggttactggatttccacgccagctaattacattgtggctaaccccagcaccctgaccggttctatcggtatcttcggcgtgatcaccaccgtagaaaatagtctggatagcattggtgttcatactgatggtgtcagtactagtccgctggcggatgtttctatcaccagggcactgccgccggaagcgcagctgatgatgcagttaagcattgagaatggctataaacgctttatcacgctggttgctgatgcgcgtcatagcacgccggagcagattgataaaattgcccagggccacgtctggaccggtcaggatgcaaaagctaacgggctggtcgatagtctcggggatttcgatgatgcggtcgccaaagcagcagagctggcaaaagtgaaacagtggcatctggaatattacgttgatgaaccgaccttcttcgacaaagtgatggacaacatgtctggttctgtccgggcaatgttgccagatgcgttccaggccatgttacctgcaccgctggccagcgtagcctctaccgttaaaagtgaaagtgacaagctggccgcgtttaatgacccacaaaaccgttatgcgttttgcctgacctgcgccaacatgcgttaagtcttgtactgagtggccgacagatcgtcggccacattattttttacgtcgacgaatcctcttcccgctgtttcgccccatatttccttatccgcatagtatcaggtgcgctccccctgcctcacgtatatacttttgctctttcgatatcattcatatcaatatcatgcaaaagaaaagtatttacgttgcctacacgggcgggaccatcgggatgcagcgttccgagcagggttatataccggtgagtggtcatctacaacgccaactggcgctgatgccggaattccatcgcccggagatgccagatttcaccattcatgaatatacgccgctgatggattctagtgatatgacgccggaagactggcagcatattgctgaagatattaaagcgcactatgacgactatgatggttttgtcattctgcacggcaccgacacgatggcgtataccgcctctgcgctgagcttcatgctcgagaatctcggtaaaccggtcattgtgacagggagtcaaatcccgctggctgagttacgctctgacggacaaattaatctgctgaatgcgttgtacgttgcggcgaattatccgatcaacgaagtaacgctctttttcaataaccgattgtatcgcggcaaccgcactaccaaagcccatgccgatggttttgatgcgtttgcctctccaaaccttcctccgttactggaagcaggtatccatattcgtcgtttgaatacgccacccgccccgcacggtgaaggggaattaatcgttcatccaatcaccccacaaccaattggcgtagtgacgatttatccagggatttctgctgacgtcgtgcgcaattttctgcgccaaccggtgaaagcattgattctgcgctcctatggcgtgggtaatgcgccacaaaacaaagccttcctgcaggaattacaagaagccagcgatcgcggtattgtggtggtcaacctgacacaatgtatgtccggtaaagtgaacatgggtggttatgccaccggtaacgccctcgcccatgccggcgtaattggcggtgcagatatgactgtagaagccacgctaaccaaactgcattacctgcttagccaggaactggatactgaaaccattcgcaaggccatgagccaaaacctgcgcggcgaactgacgccggatgattaaggagactgtaatgccccctcgcgccctgttactggtcgatttacaaaatgatttctgtgctggtggcgcgctcgccgtgccggaaggtgacagtacggtggatgtcgctaaccgcctgattgactggtgccagagccgcggtgaagcggttatcgccagtcaggactggcacccggcgaatcacggcagttttgccagtcagcacggtgtagagccttatacgccaggccaactcgacggtttgccacaaaccttctggccagatcactgtgtgcagaacagtgaaggcgcacaattacatccgttactgcaccaaaaagcgatcgcagcggtgttccataaaggcgaaaatcctttagttgacagttacagtgccttttttgataacggccgtcggcagaaaacctctctcgatgactggttacgcgatcatgaaatcgatgaattgatcgttatgggcctggctactgactattgcgtgaagtttaccgtgctggacgcgttacagttaggttataaggtaaacgtgattaccgatggttgtcgtggcgtgaatatccagccccaggacagtgcgcacgcgtttatggagatgagtgcagctggggcaacgctatatacgctggcagactgggaagagacacaggggtaattttacgctggcctacaattctgtactggcattgtaggccaaataaaacacgtcagtggcacatctggcaattgatgccatcaacgaaagatttaattcacctcagaaatctcttccaagctcaccttccgcgtttcgatgccaaaaatggagagaaccagcgcacagagcaataacataacaccaagtaccataaacaccgtgatgctcccataatgtgttaataatgccgcaacgccatagggcgtgaagactgcgacgatccgtccgacggcattaacgaaaccgctaccgcgcaggcgtaaatgcgttggccaaagctccgggatataaaccgcgctcgcgaagcaaacatacatgtataaaaagaagatcatcaccagtccatagattaaaatcgcccactctgtagtctgaatactatagatatagcctaacacggcaataataataagtaaggtggagccaaataaccgacgaggaaaatgatcaataattaatgccgcaataaatattcctaccggagcgccaatcataataacagcggtcattaatatacttttatcgacatcaatgccggagttaacaaatatggtcggtatccatacggtgatggtataaaggctaatgttcattgcaattaaaacagtaatcgcgactaatgtacgtcgtaacatttcacctttaaacaggagccagaaagtacccttgattactttaaccttgctgttgctctgatagctagtaagcgggggtaaacgaatactcttctctctttcaatttgctgctctacttcacgaagttggcattctgcacctgcgatttgccctttccctgccagccatcgtgggctctcgataaagtatttaccactgagaaaccaggctaacagtatgccaataccacccagcagaaacattattcgccaactaaaaaaagcgataaccaccacgcctatcgccgcagacagcatggggctccagttaccaacaaaactgagccgcgcggaccattttccacgcaccgtcgcggggataaactccgtaaaactggcatagccaaccataatcagcgcccccattcctgttcccatcaggaagcgaaagaagatgagccagtacatatcagggacaaaagcggcccctgttgcagcaataccgacgatgagaagatttatgcgaaacgccctgcgccgcccaaagtagtcaccaataaacccaccagtaagactgccgatgaaataaccaaacattaatgcgctggtaaaggcggcattgaggaaattattactccatccattgcttaccagctttgctaagacgacattaccggagtaactcaaaaaccctgttaataacagactaaagcttataataccaaatatacgataatgaaaccgggccaaaggcaagcggtccagtcttgcgccaatttgatcatattgttccattaggtgcctcggatttgctaaaaaggtagcaattgcggcaaattcacttgccgcatctttatcatcattttatttcaaggcgcaggaacaaataatattgacaacgtgtgcttaaattaccacaccagctggatattattgtctttgcaaaatgctatccactctgcacccggacttttatcagttattatgtaattaatatgactaaaatcagctaactggacaaaagctttgcgatcaaacttagagtgatcaaccaataacgcaacttctgtcgcctgacggatcattgtctttttgatttcagcttccgcttcattagagtccagcgcgccgctgttaatatcaagacctttacaactcattaccatgatatcgacatgatagcgcctgatgatctctttagtaattcttccttgcagactaagtgtatttttgtttagttccccacccgtactaacgactttaatttcactctgagccagaacatgaatcgcttccgcgctgttggttagcaacgtcaggccactacggtcctgtaacaatttgagcaattccattacggtactactggaatcggctgccatggtggttttattgtcgataaagggtagtgccttgcgtgcaataagctgcttctcttcataaaagctactagcgcgcttataaaaatggatattctccgtcaacatcgctgtatttaaaacagcaccaccataggttctggtcaaaaagccttcatcttccagcttctcaagatcgcggcgaatggtttcttcggttacctgaaaaatcccactcaaattactgactgtcacctttttatcgttggcaaccatttgcttaattgcctgaatcctgtcttttgccgccacgattacacccctgtatctttttacatcacattagcgcgattatcgcataaccgatgtttactttcaaaataacctgtttgaatcacagattttcatcacagttttcacagaaacagaggtgaatcgtgttgagtatttaacgctccagggcctctgccatttccctcatcaatgttgcgtctgcatcgcttaagttgatattcagtgccgcgacattttcgcgtacctgttccggtgcagtagccccactaagaatggagattaaatcactctgttttaatatccacgccagtgccagagtgggaattgtgcactgataacgagcacaaagtggctgccactgttcaagcatatcaatcactttcagcatgttttcacgctggaaccagactttatttgcccgagcgccgcccggaacgtaatcacgagtgatggtgccggtcaacaatccctgctctagcggggaataaacctgaaccacaatgccattatcacgacatagtggcagcagttcgttttccattgcccggtcgaggatactgtatttcgcctgaataatatccagttcaccatattgcagatactcgcggatatggtcagcatcgacgttagcagcgcctatagcgcgaattttcccttcagactttaactcattaagcactgcgacagtttcagcgatcggcgtaaaaaatggcggcacgctctgccagtgcgtcatgtagatatcgatgtaatcaatacccagacgttgcaagctcgctgctacctcttcgcggatagattccggggaaaggtttttatacaactgccgatcgccaactttgttgaataaacttccttttcgttcccagacaatgccgcatttggtttctactacaacctgttcacggggcagtttttttaacgcctgaccgacgataacttcactattgccaaagttatatcctggcgcagtatcaatcagattaatgccacaacgatgggcttcaagaatcgtatcaatacatatttgccgatcgagatcgccattccatgcaggaccgccgccaatggcccatgtccccaaccccattcggctaagcgtaatatccgttgtgcctaaaggtatctttttcatttgccttcattatccttcgtattcttccagcaattgttcgaccagctttctgttttttacgccggtggtggcaccgacgcttagaacgctgatagccgccgttgcattggcaaagcgtgcgcattcacgcagatttttgccttctaacagtgccgcaataaaaccactagcaaagttatcgcccgcgccaatggtgtcgatggcggttattcctgcgaccgccggcaccttcatcgtcatgtcaccacgcttgataaagcagccgtctttacccgttttaatcaccaccgtttttacgccgcacgcaagaaagcagtcagcaatttcatccagtgtctctttcccggtgagtaattttgcctcggcaaaattaggaaacagataatcgacataactcaatgcttcgcaaatatcatccagcgtttcattcaaccgcggtttgatcatatcggcacagataatcatctgccgggctttagcttgcgtaaaaatttctgttagcgctttaccatccaatagtggactgttgaaaatactggccagacttaataatttcgcctgagaaaaccgcgcaaaatcaacatcgtcaatattcaatttccacagactgccattacggtttgtgacaaacgtccgctcgccatcctccgtcaccagtccaacgttaatagaggtatctatgctgacgtcctgcttcaggctttgaatatcaatattctctttgcggcaatggtcgagaataaattgccctgcggcatctttaccaatacgactcattaatgctgtgcgatggcccagacgagaaataattgttgcttcatttattgcatcacccccggtggtcattgcgattctttcaagaggataagaatccacatcaaagatatttttactgaccggttgcaatggaatatcaacaatagcggcacctatacaaataacgtcgagattatccatatcattattccgctttgccatcagaaccgaacagtttaattttttccaatgcccgttcttttacagctttacgtacttcacgttctaaatgcaggaaaggctgatcctggttttctttcactgcaaccattgcggcctgacagagctccgtatgaatgttgattttcgcgatacccaagctaattgcagttttaatgtcggcatcactgatcccgcttgcaccgtgcaaaaccagcggaacagaaacggcatcgcgtacgcgtttgacgacctcaaagttcaattgtggctcactcgtataaaccccatgctggttgccgatggcgacagccaaactatcacagcccgtacgttcaacaaattcagccgcctggtcaggatcggtatagtgatagcccgccagcgcttcctcataaacggtttcattaccgacatgccctaattccgcctctaccggaatacccagcggatggaagaaatcgacagcctctttggttaaacgaatattttcttcgaaatcaaacgcggaagcatcacgcattaaactattcataccatgagtccaggcgttatgaataatctccatactccgaccatgatcccaatgagttattaccggcaccgttgctttttgtgccatacttaccatcatgtgagagaaatcttcaaaactggtgttaccgacaaaacctgtaccaaaagaaataataaccggggatttcgcttcttcggctgcgtcgataacgcccatcaacatttctgcattccatacgttaaaatgggcaattgcataatgtttatttgtggcatcgttttcccaatatctgatatctgcgagcatgttctgttctcccgtattaattaatcgctaattttaataacgcctttaataatgtcgcgtttgttgttaacactctcttcaaatgcctgttgtacatcccgataatcgtaaatatgcgtcaccatgcttttcacatcgaatcgcccactagaaatagcttcaatcgtgaccggataacgattggcatagcggaataccgtctggatagtgacttcgcgattgattttgaggaaattgattgcgctatcgccgggtacagtaccaacaatcataattttaccgccgcgcattaccagataaggtgcctgtttaacggtgaccgcagaacccgctgtttcgaaaacaatatctgcgcccatgtcttcggtaaattgctgacagcgtgcaatagtgtcttcttttgcgccgttaataaccactgtcgcaccaagctgttccgccattgccagacgtttttccagcacatcaacgacggcaatttccgttgctcccaggcatttgcacgcttgcaacgtcatcaaaccaatacaacctgctcccagaataattatcttcttacccggtttaacatctgccagcatcgcggcatgcatcccgactgcggcaggctccaccagcgccccttccatcgtgtccatattgtcgggcagtttgtaagtaaagctctccggatgacacagatagtgcgttaatgcgccgcggtagttgggttgtgtcgccataaaatcaacgtccgggcagatgttatatttgccttccagacagtaacgacagtgaccgcaaggaacgccaggttcgatatttacccgatcccccggtttaaatttgcgcacgcggcttcccacagccacaaccgtcccggcgcattcatgacccaggccaatttcttgatttgggtctttaggcggaataaacgggccactttcaaaaccatgtacatcactaccacaaataccgacatattctactttaatcaaaacttcatcttctttaggcactggtatttctgcactaataattttcattgtgcccggcacctgcaatattgctttactatttttcattttgaatccacccgtattatttattggctactgcatcaatacttaaactttcaacggagacacctttggtttcgattccaatggtggcgatagcaattgcgacaataatactaaccgcccccagaagaataaagactcccgtaacgccataactactgagcagcactgcaacggcataaggtgcggcaataccactgattcgccctaccgcattcgccagaccggagccacggagtttggcctctgtcggccagatttcagggacatacactgcgctggcatagcaagcgtacatatagacgaaagtaatcaggaagaaaccaatcaacgttatgagcaacatactggtttgcagactatagatatatccgagcaccgcaatcaggattaatagccccacacccattgttttacgcggaattttatccatcaccagcatggcaataaaaataccaaatggcgcgccaaacatactcatggtatttaaaacaatgctgtcttttaaattaatcccctgggtcatgaatattgttggcaaccagttaattagtgtgtactgcacaacgttcatggcaatcagcacacaagagcctaatatcacgcgtttcagtaatactcctgtcagtaaggcactatacggcaccgcttgtggcgctttaccgtcatcagcaataaccacaggcggcaaaggtttacccgtctggcgtatgacgccttcttctatactccgcatgactttctcggcttcctgataccgtccgcggctttccagccagcgcggggattcaggaaagtagcgccaggccagcgccgtagcgataaggctcaatattgcagggataagcagttgtacccgccagttccactctgcactaatcagcggcgtgagtcccatcgctatcaaactacagagcggataactccagttgccaataaaggaaacccgactactccacgttccacgatttctaccgggcatatattcggtgaaaccagcaaacagcgtaaccagtaaagctcccagcccaactcccatcacaaaacggcaggcaataaggaaatccatattcggactgaaagcaccgacaaccatgctggcaatatgaatggcctcatagaggatgaacgcatttctgcgaccggttttgtcgccaatgatgccgcccaccagcgcaccgagaaacattccggcggtcgtgattgcactgaatgtggctgtggtggaattatctgtccagcccaacgctttcagctgcgcgaggatcaagccaccaacggcattactccagcagacaagcaagccaaacgcgacgatggcaaacatactactatgccagcggcaatccggtaagcgatccagccgtgcaccacaatgcggttttgttatctgttccatgcgataacgttccttcaggagagtggttattcatcaaagtcgtaagtcatgatcactttgattgcggttttatcgaccatcgcatcaaacccttcgcgccattggctcaggccgatacgatgcgtgatcatcggtttgactttgatagcgccgctggctaatagcctgatagcgttacgccaactggtggagtcataggccatatgcccaatgatgcttttgttccaggcggtaatgtcattaatgctgaaatcaagaggtttgaagcccattccaacgcgtaccacttccccgttcgggcggagcatttcgatggcttgtttcagtgcgatattggcaccggagcattcaatcaccagtcccagattgtctttgccacaaatttgctggcagcgcgccaccacatcttcggtagaaccatttactactgccgtcgcacccagttcttttgcaaccgggaagcggaccgccacatcttcttgcagaccaacgacgacgatatttaccgcccccataattcgcgccatttgtacggagaacagcccgagtgggccagtgccgatgacgaccacatcctgaccaggaaggaatttgctttgctgcgcgatggatttgtaggcattacagatagggtcaagtacggctgcgtcctcataatcaacaccatcagggatttcccacaacgcatgacgatgaattttgagaatttcaccaggaaccagacaatatttggaaaaaccaccgccccaggtattattatccagaccaaggtttactttttctgtacaacacagaaaatcaccttgttcacaggccggacaaacaccgcaaacgtgaccgctgttatcgcttacgacgcgttgccccactttccagtctttgactttttcaccaacctgcgcaatacaacctgcgaactcatggccgcggatagagttaaactcatcagaaccgctatcgacattgtagtgcttcatgtctgcgccgcagattgccgcggctttaatttcaatcactacatcttccgggccacacatgggttgtgggacatcaatcatcttgtagccgccaaaggccttgccaaaccgagccagtgctttcattgcgtcatcctctgtgtttagttttgcttagatggccatcatacttacccacatgatttttgaggtcaacattaaatctgtaaaacacagataatgatctgcgttttacaactcagatcacaattacgcagaaaatggctgggtctgttacaggttgatggaaggcggggcgcaaaaagagcaaattcgagagggattaccggccaaataggtctgagacttaagttcaggagaagtcattcaggtgtgaacgggacggcaagagatcggactgggacttagccaggtcatggcgagataattgagatgagtcgtggggtcattgttggctatccccttcatagccgaggcaaaaaggggatgaaccacttacttaaacatggcaataggctttgcactgataccaaaatcttcttttaactgctgtttgctcttcatgaccatctgaccatttgtgtcaattgtcatatgctgtgcttcgatattatggcgggcttgccacagcatcaccagttgcaggcagttctctttttgttcctcggtcaacgcaacgccatcaggccatttccccagttcaacggcggtgctcaaacgctggtatacctcaggcatcatgctgttgataatgtcatcaagattcataatttttccgctcctgtggaataagttgctgaatcgttttttcaaccgttgatttcttcgccgttttcgccatcggtaaagcgtaaagaggcagagttaacacaataacgttcgcccgttggctgcggcccgtcggggaagacatgccccagatgggcatcacagttaccgcaacgaatttctatgcgctgcattccatgactcaagtctttgatataacgaatggattcttcacttaccggttcgtagaaactgggccagccacagccggaatcatacttggtttgggaatgaaacagcggggcatcgcagatcaaacagtgatatacgccgtcacgcttgttatgcagtaaacgacccgtaaatggcggctctgtcccatgattctgcgtcacgtaaaactgcatctcggacaaattttttttcagttcttctgcgctaggtttattagccatttgctcacatctcactttaatcgtgctcacattacgtgactgattctaacaaaacattaacaccaactggcaaaattttgtcctaaacttgatctcgacgaaatggctgcacctaaatcgtgatgaaaatcacatttttatcgtaattgccctttaaaattcggggcgccgaccccatgtggtctcaagcccaaaggaagagtgaggcgagtcagtcgcgtaatgcttaggcacaggattgatttgtcgcaatgattgacacgattccgcttgacgctgcgtaaggtttttgtaattttacaggcaaccttttattcactaacaaatagctggtggaatatatgactatcaaagtaggtatcaacggttttggccgtatcggtcgcattgttttccgtgctgctcagaaacgttctgacatcgagatcgttgcaatcaacgacctgttagacgctgattacatggcatacatgctgaaatatgactccactcacggccgtttcgacggtaccgttgaagtgaaagacggtcatctgatcgttaacggtaaaaaaatccgtgttaccgctgaacgtgatccggctaacctgaaatgggacgaagttggtgttgacgttgtcgctgaagcaactggtctgttcctgactgacgaaactgctcgtaaacacatcaccgctggtgcgaagaaagtggttatgactggtccgtctaaagacaacactccgatgttcgttaaaggcgctaacttcgacaaatatgctggccaggacatcgtttccaacgcttcctgcaccaccaactgcctggctccgctggctaaagttatcaacgataacttcggcatcatcgaaggtctgatgaccaccgttcacgctactaccgctactcagaaaaccgttgatggcccgtctcacaaagactggcgcggcggccgcggcgcttcccagaacatcatcccgtcctctaccggtgctgctaaagctgtaggtaaagtactgccagaactgaatggcaaactgactggtatggcgttccgcgttccgaccccgaacgtatctgtagttgacctgaccgttcgtctggaaaaagctgcaacttacgagcagatcaaagctgccgttaaagctgctgctgaaggcgaaatgaaaggcgttctgggctacaccgaagatgacgtagtatctaccgatttcaacggcgaagtttgcacttccgtgttcgatgctaaagctggtatcgctctgaacgacaacttcgtgaaactggtatcctggtacgacaacgaaaccggttactccaacaaagttctggacctgatcgctcacatctccaaataagttgagatgacactgtgatctaaaaagagcgacttcggtcgctcttttttttacctgataaaatgaagttaaaggactgcgtcatgattaagaaaatttttgcccttccggtcatcgaacaaatctcccctgtcctctcccgtcgtaaactggatgaactggacctcattgtggtcgatcatccccaggtaaaagcctcttttgcattacagggcgcacaccttctcagctggaaacctgcgggtgaagaagaagttctgtggttgagcaacaacacaccgttcaaaaatggcgtcgctattcgcggtggcgtaccggtttgctggccgtggtttggtccggcggcacaacaaggtctgcctgcgcacggttttgcccgcaacctgccgtggacgctgaaaagtcatcatgaagatgctgatggcgtagcgctgacttttgaattgacgcaaagcgaagagacgaaaaaattctggccgcacgactttacgctgttagcgcatttccgcgtgggtaaaacttgtgaaatcgatcttgaaagtcatggcgaatttgaaaccacctctgccctgcatacctactttaacgtgggtgatatcgctaaggtaagcgtcagtgggctgggcgatcgcttcattgataaagtgaatgacgcgaaagaaaatgtactgaccgatggtattcagaccttccctgaccgtaccgatcgcgtgtatctgaatccacaagattgcagcgtgattaatgatgaagcgctgaatcgtattatcgccgtaggccaccagcatcatctgaacgttgtcggctggaacccgggaccggcgcttagtattagcatgggcgatatgccggatgatggctacaaaacatttgtttgtgtagaaacggcttacgctagtgaaacgcaaaaagtgaccaaagagaaacctgcacatctggcgcaatccattcgcgttgcgaaacgttaatttacgttaatgttgtgtgccgggtgcaatgcatccggcacacaacatcacaccatatccagcgcagtttttccttttggtgccggatatgccttatccagcatagctaattccgcactagaaagttcgacctcaagcacagccgcattttgttggacatgggcaatcgtggccgcttttggaatcgccatcacaccctgatgactgatcacccacgccaacaatacttgtgccgcgctgatattgtgagcatgtgcaatttcgttgactaccgcgttttttaacagtccattgcgcaaccgcccggcctgggctaacggactgtaagccatcaccggcatctgctgttgctggcaccaggggagtagatcgtactcaattcctcgactaccgagatggtaaagcacctgattagtggcacactgatttccccccggcagctgccagagttcctgcatatcagcataatcaaggttagaaacgccccagcggcggatttttccctgggcgatcaatttttccatcgctgcgacagtctcttcaaaagcgaaactgccagaccagtgtaataagtaaagatcgagataatcagtattgagacggcgtaaactggcttcgcatgcatttatcgctttttgcccgccagcattccacggatagactttagagacgagaaagaccttctctcgcagaccggttaatgcttccccaaccaccttttcggcaccgccatcggcatacatttcggcggtatcaatgagggttaaaccgagttcaatgcccgcgcgtagtgcagcaacttctgttttgcgctgactggcatcttcgcccatataccatgttccctgccctacggctggcagactgacatcgccactaaattgaatcattttttgttgcattgtttcctcccaggtattgcaccaccgtaatgcaaaacagggcgtgacgccctgtttttatgcacaaaatgccctggaaagatgcattatcagaatttgtaggtgatcccggtagaaatcaggccagtccaggatttatccaccatcgggctgtcagtaacttcatcagacagacgggtgtagcgtgcggtaccgtaaacactccagtcgccgaggaagttgtagctggcgctcagctccaggtaagggctccagctgtcgttcgggttatagccacgcagaccgctgcgagcggactctttgcggcttacgccataatagtattcgttctggttttcgctgttccactgcacaccaatacccggagtcacggtcaggccaccgttggtgtaacgatacaaccaggccatatcccagacgatgccgttgctgttatccagggtatcgccagccagggtggtacgcaggtaaccgtactgggtaaagtgagcataagacagaccagccatcatggtgctcttacggtcatccaggtgacgcatttggtgatcgccactgtctttcgctttgaagtaaagcgggctccagtaagcggtaatactaagtttatccgttgcgtcattccacaggtagtaaccaccacctaagccacggaaccagaagttatcgccttcatagttgattaccggtactgggtaaacatcggtatcgtaatctttatatgggtgttcaacgacacctacgcctgcgcccagggaaaatttaccttcagcgtgcgctacgcctgcagacgttgcgataagcactccaagtgccagaagtttgagtttggtcacaattaatcattccttaaacaaatgtttagcgggcgacaaagtttacccgtcaatacatcgaaacccaacctttttacgttttcattttttaaagtaactgtttaattttcctgacgcggatgacaccgcgcttacagccaaatgaatttagcgttactggcgagcctggtctttacattaattatgcaaaatttatggatgagttgttgatatgccattgaaattaagaaagccgtgcaggcaagttttccatttgccatctacgcttaattttgaaggtgtatcaccgggcacgttgttctcatcgtcgataaaatggcatgagagttgctgtgttttagcaagagacgtcgttcagtttacctcttccgggagcctctactattcatatgaacggctcttaacctgtgctaaaaaacgaaaggacggcataccatgaatatattcgatcactatcgccagcgatatgaagctgccaaggacgaagagttcacactgcaggagtttcttaccacttgtcggcaagatcgcagtgcttatgccaacgcggctgagcggctattgatggctatcggtgagcctgtcatggtcgatacagcccaggaacccagactttctcgactcttttctaaccgggtcattgcacgttatccggcgtttgaagagttttacggcatggaagacgcgattgaacagattgtctcttatctgaaacacgcggctcaggggctggaagagaagaaacaaatcctgtatctgctggggcctgtgggtgggggtaaaagtagccttgctgagcgactgaaaagtttaatgcagctcgtaccgatttatgtattgagcgcgaacggtgagcgtagcccggtcaacgatcatccgttctgtcttttcaatccgcaggaagatgcgcagattctggaaaaagagtatggcattcctcgccgttatctcggcaccatcatgagcccgtgggcggcaaaacgcctgcatgaatttggtggcgatatcactaagttccgggtagtgaaggtctggccgagtattctgcaacaaattgctatcgccaaaacggaacccggcgatgagaacaaccaggacatctccgcgctggttgggaaagtcgatattcgtaaactcgaacactacgcgcagaatgacccggacgcctacggctattccggtgcgctgtgccgcgccaatcaggggatcatggaattcgttgagatgtttaaagcaccgattaaagtgctgcatcccttgttaaccgccactcaggaaggtaactacaacgggacggaaggtatctccgccctgccgttcaacgggattattctcgcacacagcaacgagtccgaatgggtcactttccgtaataacaaaaacaacgaagccttcctcgatcgtgtttacatcgtgaaggtgccgtattgcttgcgcatttccgaagagatcaaaatctacgagaaattgcttaatcacagtgaattgactcacgccccatgcgcccctggcacgctcgaaacactgagtcgtttttccattcttagccgcctgaaagagccagaaaactccagcatttatagtaagatgcgggtttatgatggcgaaagtctgaaagacaccgatcccaaagccaagagctatcaggaatatcgtgactacgccggtgtcgatgaagggatgaacggtctgagcacgcgttttgcgtttaagatcctctcccgcgtgttcaacttcgatcatgtagaagtggcagcaaacccggtccatctgttctacgtcctggaacagcagattgagcgcgagcagttcccacaagagcaggcagaacgctatctggagttcctgaaaggttatctgatcccgaaatatgccgagtttatcggcaaagagatccagacggcctaccttgaatcctattccgaatatgggcaaaacattttcgaccgttatgttacctacgcggatttctggattcaggatcaggagtatcgcgatccggataccgggcagctgtttgaccgcgagtctcttaacgccgagctggagaaaatcgagaaaccggcggggatcagtaatccaaaagatttccgcaacgagattgttaacttcgtactgcgcgccagagcgaataacagcggacgcaatccgaactggaccagctatgaaaaactgcgcacggtcatcgagaagaaaatgttctccaataccgaggagctgttgccggttatcagctttaacgccaaaacgagtaccgacgagcagaagaaacacgacgactttgtcgaccgtatgatggaaaaaggctacacccgtaaacaggtgcgtttactgtgcgaatggtatttgcgcgtacgtaaaagctcttaacaaccctggcccggtacacatgttaccgggcctacaacgacagcgaaccgtgggcctgagaagcggcaacacaggcgtagcatacagttggcaaatgtagtacggggggcatatgacctggtttattgaccggcgtctgaacggcaaaaacaaaagcatggtgaatcgccagcgttttttacgccgttataaagcgcaaattaaacagagcatctccgaggccattaataagcgtagcgtgactgacgtcgacagcggcgaatccgtatccattcccacggaagatattagcgaaccgatgtttcatcaggggcgtggcggtctgcgccaccgcgtgcatccgggcaatgaccatttcgtccagaacgaccgaattgaacgtccccagggtggcggcggaggttccggcagtggtcagggccaggccagccaggatggtgaaggtcaggatgaatttgtctttcagattagcaaagatgagtatcttgatctgctctttgaagatttggccttaccgaatctgaaacaaaaccaacaacgccagctgaccgaatataaaacgcatcgggcgggttataccgctaacggcgttccggccaatatcagcgttgtgcgtagtttgcagaacagtctggcgcgacgcacagccatgacggcaggcaagcggcgggaacttcatgcactggaagagaatttggccatcatcagcaacagtgaacctgcgcaactgctggaagaggaacgtctgcgcaaagaaattgcagaattacgtgccaaaattgaacgcgtcccttttattgacaccttcgatttacgttacaagaactacgagaagcggcccgatccctccagccaggcagtgatgttttgcctgatggacgtttccggtagtatggatcaatccactaaagatatggctaagcgtttttatattctgctgtatctgttcctcagcagaacgtataagaacgtggaagtcgtatacatccgccatcatacccaggcgaaagaagtcgatgaacatgagtttttctacagccaggaaacaggcggcaccattgtttccagcgccctgaaactgatggatgaggtagtgaaagagcgttataacccggcacagtggaatatttacgctgcacaagcaagcgacggcgataactgggccgatgactctccgctttgccatgaaatcctggcgaaaaaattattacctgttgttcgttattacagctatatcgaaattacccgtcgtgcacatcagacattgtggcgagaatatgagcatctgcaatctactttcgacaactttgcgatgcagcacatccgcgaccaggatgatatttatccggtgttccgtgaactgtttcataaacaaaatgcaacagctaaaggctaaaactatcagccaggtcattatcgcctggctgatttttagcttactgtaaattatctcatttattacatacattagcttacaatcgctttaaatatgacagcataacctttacataatttagttccagaaaacaatcattcggaaaaatgattcagagtacacgtatttccatggggttattctttaaatattttttaagcttaacgaaaattgatcctggtcaaaactatatatctctgccaagtataaaatccagcactcacattgctctcctttttatggtttctatgggtacacaaaaattaaaagctcaaagcttttttattttcagtttattgctgacgttaattttattttgcattactaccttatataacgaaaacacaaatgtaaaactcatcccacagatgaattacctgatggttgttgtggctttgtttttccttaacgccgtcatttttcttttcatgttaatgaaatatttcactaacaaacaaattttaccaacactcattttaagccttgcatttttaagtggccttatctatttagttgaaaccattgtaattatccataaaccaattaacggcagtacactgatccagacaaagagcaatgatgtttctattttctatattttccgccaactcagttttatttgtttaaccagcctggcgctcttttgttatggaaaagacaacatccttgacaacaataagaaaaaaacgggaatcctgttgctggcgctgatcccttttttagtttttccccttctggcacacaatctgagcagttataacgctgactattctttgtatgtcgtcgattactgtccggacaaccatactgcgacctggggaatcaactatacaaaaatattggtttgtctgtgggcatttttactgttctttattatcatgcgcacacgattagccagcgaactatggccgttaatagcattattatgtctggcaagcctatgctgcaacttacttctactgactctggatgagtataattatactatctggtatatcagtcgcgggattgaagtttccagtaaactgtttgttgtgtcttttctgatttataacattttcaggagctgcaactctccagcaaactggcagttcatgatgtgctgaccaatatttataatcggcgctactttttcaacagcgtagagagtttattgagccgacctgttgttaaggacttctgtgtcatgctggttgatattaatcagttcaaacgcatcaatgcccaatggggacatcgtgtgggtgataaagtgctggttagtattgtcgatattatccagcaaagcatccgccccgatgatattttagcgcgactggagggtgaggtgtttggcttgctatttaccgaactcaatagtgcccaggcaaaaatcattgcggaacgtatgcgtaaaaatgtcgaactcctgaccggctttagtaacagatatgatgttcctgaacaaatgaccatcagtattggcacggtttttagtacgggtgacacgcgtaatatcagccttgtcatgacggaagcagataaagccttacgcgaagcgaaaagcgaggggggcaacaaagtgattattcatcatatttaagtgcaaaaatattcagagccatgctttttgcgtggcttttgcatacaatttattactattacccctaaatttcccctccccagcggcgcagagatgagtataattagcgcccctgtgccaggccgcaatcgaactttatctggttttctcgtttcactaaccgaaggagatgcgtataaagcttccgatgagcgtttatatgtcaataagcagaacaaaaacagccgttcatgataaccttctgtggttgtttgcttgtaatctcaggagcgtgaaatgactgaaatggctaaaggaagcgtgacgcatcagcggttaatcgctttattaagtcaagaaggtgctgacttccgcgtcgttacccatgaagcggtaggtaaatgtgaagcggtgagtgaaattcgtggcaccgctctaggccagggtgctaaggcactggtatgtaaagtcaaaggcaatggcgtaaatcaacatgttctggcgatcctcgcagccgatcaacaggccgatctgagccaactcgccagccatataggcggattacgcgctagcttggccagcccggcggaagtcgatgaactcacaggctgtgtcttcggcgcgatcccccctttcagcttccatccaaaactcaaactggttgccgaccctctactcttcgaacgatttgatgaaatcgccttcaatgcaggcatgctggataaatccgttattttgaaaaccgcggattatttgcgcattgcgcaaccagaactggtcaatttccgccgcactgcgtaattagccggtccgttcgataagaagaacggacaaaaccagtacaacagcaatggcaaaaaagctactcgtgataatcagtgtctcgacaaacatttgatcgttcatagcatgcccccgggagatagctgttttcacgttattgttagcgtgcacaaatggcagtttgatgacagttcgcctgattttttatgcaaaaaacgtaaagattttctacttccttcctgcagcaagcgtaaagtaagcaggcttattattttttggcaaggaaaccacgatgtttgatgtcactttgctgatcctgctcgggttagctgcgctgggctttatcagtcataacaccactgtcgccgttagtattctggtgttaatcattgtccgcgtcacaccgttaagcaccttttttccgtggattgaaaaacaggggctaagtatcgggataatcattctgacgattggcgttatggcccccatcgccagcgggacgctaccgcccagtaccttgattcacagctttctgaactggaaaagtctggtggcgattgcagtaggcgtgattgtctcctggctgggtgggcgcggcgtgacgttaatgggcagccagccgcaactggtcgccgggctgctggtaggcactgttttaggcgtagcgctgtttcgcggcgtaccggttgggccgcttattgccgcgggtctggttagcctgattgtggggaaacagtaattattgccgcgggtctggtttcgcactttgtggggaaacagtagttaatctcgcaatatatcggcctggcgtttgccccaggcctttcttaaacatagtaataaaggccgttgtactatcataccccagcgtatgagcaactttctgtacagtatcgcctttcactaatccctgaagcgccataatcagctgtaactgctgacgccactggcgaaaactcaaccccgtctcttttactatcagtcgggcaagattgcgttcactcatcgcaaaaaagccagcccattgccccaatgccccccactcgacaggccctttcgccatcatctccaccatcgtgcggattttaggatgagaagaaacgggcaggtgcagctgttgttgtggctgctgagggagttcatcaaacaggacctgaattaatctgcgggtcattggctcagcacgctgagtcgtcgtcctgtttgccagggttaaaattaattcccggcataaggggcttattttcaatgtgcaacatgttgtcggcattgtcactgcgctgggttcgataaacagaaaacagagttcagcattagctgttacttgattgctatgttccaccccgcccggtatccaaaccgcatattgtggcggcaccatccacaaagcattttccaccgtacaggtaattgcaccatgtagcgccagtatcagctgtcctttgcggtgctgatgtacaggactggttaactcatccgttccggcgtgaatacaaaatgcgaccgcggcttcatggtgtcggtcgggttcatagccattgagattcaacctgtgcatcattttgtccgaacttagcgataatttgtcattttagcttgattcaacataacaataaaaacggtaaggtacagcctcgtttgtaacaatgagaagcatatgacctgtagtactagtttaagcggcaaaaacaggattgtccttatcgctggcattctgatgattgccacaacattacgcgtcacctttaccggcgcagcaccgttactggatacgattcgttccgcttacagcctgacgacagcgcaaaccggcttattgaccaccctgccattattggcctttgcgctaatcagtcctttggctgccccggtagcgcgacgttttggtatggaacgtagcctgtttgccgcgttacttttgatctgtgctggtatcgcaattcgctctctccctagcccttacttattatttggcggtacagcggtcattggcggtgggattgcattaggcaatgtcttactgccaggattaattaaacgcgatttccctcattccgtcgccagacttaccggcgcatattccctgacaatgggagctgcagcggcactgggaagcgctatggtcgtgccgctggctttgaacggttttggctggcaaggcgcgttgctcatgctgatgtgttttcctctgctggctctttttttatggctgccacagtggcgaagtcaacaacatgcaaatttgagtaccagccgcgccttacatactcggggtatctggcgtagtccgcttgcctggcaggtcacattgtttcttgggatcaacagtctggtctattacgtgattattggctggcttccggcgatcctcatcagtcacggctatagcgaagcacaggcgggtagtctgcatggtttgctgcaactagccacagcagcacccggtttgctgatcccacttttcttacatcatgtgaaagatcagcgtggtattgcagcgttcgttgccttgatgtgcgcagtgggcgcggttgggctctgctttatgccagcgcacgcgatcacctggactctgcttttcggttttggttccggcgcaacaatgatactggggttgacgttcattggtctgcgggctagttctgcgcatcaggcggcggcactcagcgggatggcacaatccgtcgggtatttgttggcagcctgtgggccgccgctgatgggtaaaatacacgatgctaacggtaactggtctgtaccacttatgggtgttgccatacttagtctactgatggcgattttcggactttgcgccgggagagacaaagaaattcgctaatatccggtgctatagtgacgtaacaaatcatgcgtgaaagggagaacaaacacgatgaatattcagtgcaaacgcgtttatgatccggctgaacagagcgatggttatcgcatactggtcgaccgcctctggccgcgcggtatcaaaaaaaccgatttagcccttgatgagtgggataaagaaatcacgccgagtacggaactgcgcaaagcctttcacggcgaagtcgtcgattatgcaacctttcgcgagcaatatcttgcagaactggcgcaacacgagcaagaaggaaagcggctggcggacatcgccaaaaaacagccgctgaccctgctctacagtgcaaaaaacaccacgcagaaccatgcgctggtgctggccgactggctacgtagcttgtgattttagtacagcatccggcggttatttttcaccagccggatggtcacgccgccacaatgcccattcatcaatcgtttcaccgcccggtaatttgcaattgttgctgaccccttgcgctgtctgcactggaatgagcgtcccgcccttctgctggcaatagacgctcgccggatttgccataccaatctgcggcggtttaggtgcttctggctgagaaggggtactacaaccagccaggaccagcaagcaaggcagaacaaaactgataattttcatttattgatctcacatatttatccaagattagagtatcgcggtatcgttttgttttgcagcactatttttattacattcactcaaaacatattacgtcttgtttcatctttgttgatgatgttttatcatgcctgcaaagattaaataatcagcatttacccgccgtatcctggagttgttccgtgagtgatcagattatcgcccgcgtcagccaatcccttgccaaagaacagagtctggaaagtctggtccgacagcttctggagatgctggaaatggtcactgatatggaaagtacctacctgaccaaagtggatgtcgaagcgcgcctgcagcatattatgtttgcccgtaacagccagaaaatgtacatcccggagaattttaccgtcagctgggattacagcttatgcaaacgcgccattgatgaaaactgctttttcagcgatgaagtccccgaccgttggggtgactgtattgcggcacgcaatcttggcatcaccacatttctgagcacgccaattcacttaccggatggaagtttctatggcacgctttgcgccgccagcagtgagaagcgccagtggagtgaacgcgcggaacaggttttacagttattcgccggactgattgcacaatatattcaaaaagaggcactggttgaacagctgcgcgaagccaatgctgcgctgattgcgcaaagctataccgacagcttaaccgggctaccgaatcggcgggcgatttttgaaaatctgacgacactgttttccctcgcccggcatcttaaccataagataatgatcgcgtttatcgatctggataacttcaaattaatcaatgatcgttttggtcataatagtggcgatctgtttctcattcaggttggcgagcgccttaatacgctccagcaaaatggcgaagttattggtcgtctcggcggtgatgagtttttagttgttagtctaaacaacgagaatgcggatattagcagcctgcgagaacgcattcagcagcaaatacgtggagaatatcacttaggtgatgttgatttgtattatcccggtgccagtcttggcatagtagaagtcgatcctgaaacaaccgatgcagacagtgccctgcatgctgccgatattgcgatgtatcaggagaaaaaacacaaacagaaaacaccttttgtcgcgcatccagcgctacattcctgaggcgtattcacatccttttgattggtgataacatgcgaatcggtattatttttccggttgtaatcttcattacagcggtcgtatttttagcatggttttttattggcggctatgctgccccgggagcataaagatgaaaaaaacaacgattattatgatgggtgtggcgattattgtcgtactcggcactgagctgggatggtggtaacgtcacctctaaaaaatagcaaaggctgcctgtgtgcagcctttgtgcaatttaagcgttaacttttaatcttcctgtagataaatagcacgacaatcgcaccaataacggcaaccacgaagctgccaaaattgaagccatcgactttaccaaagccaaacagcgtgctgatccatccgccgactacggcaccgactatccccagcaggatagtcataaagaatccacctccatctttacctggcatgatccacttcgccagaataccggcaataagcccaaaaataatccaactcagaatgcccattgtttcctcacttatctgttttgcattagcgggttagtcgctgataaaaagcatagcacaacatcgggagggcaagatttgtgacgagcatcacggaggttttttttgcgatggcgcagaaattgcgccatcaacgatcagtgataattaccaaccacaaacatcatgttcgttttccgtgtcataagaacgtacggtattcaccagatcttttatcacttcagccgccacttctggcaccagcaaagtcatcggcgtctctgtttcataatcgacagaaacgccattgctgttattggtgacggtcacggtatacgttgctttgcccatgattcatttcccgttatgaatgactttccgttgttgcgcaccttccatcaggacttcaggagccacgaagaagtcaatgttgaaataagtatcgtcagtcatggcttcaatgttgtgccacttttctggagggaacaccgcaaactgccccgcttcgataaggatcacctgatcaggctctgcactgtgttcatcagcgtagccgagatatttgaccgccccatgcataacggaaaggcgtgggtaaacccccgggcgcgttcctttatcaagatgacgttcgaatattccggcaggtgcagtttgtttattccagaaaggcgtactgcgcgtatgaatataattctgtgggatttgaagcatccttttccctccttcggtgaatgcgctgaaaacggtttattccagccgtttcagggtacgcctgataatttgcattttaaataccatttattggttactttttagcaccatatcagcgaagaatcagggaggattatagatgggaagcccgcgacaacgcgggctgaaagcatcaggattgcagcgtcgccagtcgggcagcgaaacccacgaacatcaaaccaatcagactgttgccaactttagccagtttctttttggtacgtatgtactgcgtgacaaaagcaccagatataatcaggaagctcaaatagcagaaactcaccagttccagcgtcgccgccagaataaagaaactaattcccgtatgtggggcattaacatcgataaactgtacgaaaaagctcacatagaacaaaatggctttcggattagtcaggctcaaaattaacgcgcgtttaaaaatagcaccgtattggggctcatcggatttggcctcgctatttttacccttcagggtcgcgtaaagaattttactccccagatagagcaaataaaacgcaccaagataacgtacaatgttgaataatatcggggtggtcttaattaatgtcgccactccagcccatgccagaaacatcaataccgcatcgccaataaatacaccgcaggccgcaagataaccgcctttcataccgctactgacgctatttttgagtacaaacagggtatttggccctggcaccaacacaataaaaatggccccaaccagataggtccagtaattcagaaccccgtattcagcgaacacattaacctctttaattatctttcgatcatgcgcgattaaaggtgaatatgctaaccaatctgtagcggcttagaaaggagaaaatcaggttttaacctgatatcaacccgataattgaatcattaatcaggcatgctccagactaaaattcgggtagtgctcggcaaaatactggcgtaaaaattctaccgttatccgcactttcgcactcgtcgccagcctactaacataaacggcccagacgttcgctggctggtaatattccggtagcacttgcactaaatgaccactggcaatgttttcgctaacatcccaccaggaacgcagagcaatcccctgcccatcgagacaccactgatggacaatttctccatgattagagctcagtgggccggtgactttaatcgcatgggggccttctttattgcgtaattgccagacaccaaaaggatgatcgcgctctttaatgaccaggcacggcaatgcagaaagatcggttaaatgtttcggcgcgccatgttgcgcaataaattccgggctcgcgcagagaatacggtaattggtcgccagtttgcgggcgattaaattaggggcgatgtcatcgccaatgcgaatatcgagatcgacaccttcattgaccaaatcgaccagtcggtcttccacatcaaaacgtaattccagttgcggatacgccttcgccagcgctaataacgccggagccaccacctgtcgtccaaaaccaaagctgctgataatacgcagcatcccctgcggcacctgacgcacgtcagaaagttcgtccatcatctgaccgacatcctgcaaaatccgctgcgcccattcataaatccgctctccttcttcggtaatggtgacgcggcgggtggtgcggtgtaacaacaccacgtttagcgtttgctccagcaaggcgatgcgcttgctgacgaacgccggactaacgcccagttcttccgccacggcggcaaaaccagcccggcgagccaccagcataaagacgcgcaaatcattcagcagcggtaaattattcatgattcgtgttttatgtttcaccagttacggggattaattccttttcagtcaattataggatggtgatgttgtcaattttgatggtcaggaagtgagaacccaatgatgaaaacgatgcgtattgctgcgatcccgggagacgggattggcaaagaagtccttcctgaagggattcgcgtgttacaggctgccgctgagcgctggggcttcgccttgagttttgagcaaatggagtgggcgagctgcgagtattacagccatcacggtaaaatgatgccggacgactggcatgagcaacttagccgtttcgacgccatctattttggtgccgtcggctggccggataccgttccggaccatattagcttgtggggtagcctgctgaaatttcgtcgtgaattcgaccagtacgtcaacctgcgcccggttcgtctctttcctggcgttccctgcccgctggcgggaaaacagcctggcgacatcgatttttacgtggtcagggaaaacaccgaaggcgaatattccagcctcggcggtagagtgaatgaaggtacagagcatgaagtcgtcattcaggaaagcgtatttacccgccgtggtgtcgatcgcattttgcgttatgccttcgaacttgcgcaaagccgtccacgtaagacactaacttctgccactaaaagcaacggtttagccatcagcatgccgtactgggatgagcgagtggaagcaatggccgagaattacccggagatccgctgggacaagcagcatattgatattctctgcgcgcgttttgtgatgcagccggaacgattcgatgtggtggtggcgtccaatttgtttggcgatatcctttccgatcttggcccggcctgcaccggcaccattggcattgccccatccgccaacctgaatccggaacgcactttcccgagcctcttcgagcctgtccacggttccgcgccggatatctacgggaaaaatattgctaaccctatcgccacgatttgggccggggcaatgatgctcgattttctcggcaatggcgatgagcgtttccagcaagcgcataacggtattctggcagcaattgaagaagtgattgctcacgggccgaaaacacctgatatgaaaggcaatgccaccacgccacaggttgccgacgcgatttgcaaaattattttgcgttaaggtcaaaccagtttatttgaaccgcgtcactgacgcggtttttttattcgttctttgcagtaaataacctgcgtcatttcaccttttattgtttccgtttcgtgttttatggctttccgtattcttaattgtttaatttatgtaacatgcaaattttgttacgcgtacgttaggttccgccgtacaggtattggttttgctggcaatgggactggtgatttatttagccaccagtaaatacggcaatattcgtcttggcgaaggaaaaccggaatacagcacgctctcctggctgtttatgtttatttgtgccggtttaggttcttctacgctttattggggggttgctgaatgggcctattattatcaaacacctggattaaatatcgcaccgcgtagtcaacaggcactcgaatttagcgttccctactctttcttccactggggcatcagcgcctgggcaacttatacgctggccagtttaatcatggcttatcactttcatgtgcggaaaaacaaaggtctgagcctttccggcattattgctgctattaccggcgttcgcccgcaaggcccatggggaaaactggtcgatttgatgttcctgatcgccactgtcggcgcactgaccatttcccttgttgttaccgcagcaacctttacccgtgggctttccgcgctgaccggtttacccgataacttcaccgtgcaggcatttgtgatcctgctttccggcggcattttttgcctaagcagctggattggtatcaacaacggtttgcaacgtctgagcaaaatggttggctggggcgcgttcctgctgccattactggtgctgattgtcggcccaaccgaatttattaccaacagcatcatcaatgccatcggcctgaccacgcaaaacttcctgcaaatgagcttattcaccgatccgcttggcgatggtagttttacccgcaactggaccgttttctactggctgtggtggatcagttacacccctggcgtagcaatgtttgtcacccgcgtttcccgcggtcgtaagattaaagaagttatctggggactgatcctcggcagcaccgtcggttgctggttcttctttggcgtaatggaaagctatgccattcatcagtttatcaatggcgtaatcaacgtcccacaggtgctggaaacactgggcggcgaaacagctgtacagcaagttctgatgagcttgccagccggtaaattgttcctcgccgcatacctgggcgtgatgattattttccttgccagccatatggatgcagtggcctacaccatggcggcgaccagtacgcgtaatctccaggaaggtgacgatcctgaccgtgggctgcgtcttttctggtgcgtggtgatcactctgatcccgctttccatcttgtttaccggtgctagcctggaaacgatgaaaaccaccgtcgtgctcacagcccttcccttcctcgtcattttactggtgaaagtcggcgggtttattcgctggctgaaacaggattacgccgacattccggctcatcaagttgaacattatctcccgcagacaccggttgaagccctggaaaaaacgccagtgctccctgcgggaaccgtattcaaaggcgacaactgagcgccatcatcctaacgataaaggtatccctatgagcaatctgagccctgactttgtactacccgaaaatttttgcgctaacccgcaagaggcgtggaccattcctgcccgtttttataccgatcagaacgcgtttgaacacgaaaaagagaacgtcttcgccaaaagctggatttgcgtcgctcacagcagcgaactggcgaatgccaatgattatgtgacgcgtgagatcattggcgaaagcatcgtgctggtacgcggtcgtgataaggttttgcgcgcgttctataacgtgtgtccgcaccgtggtcatcagttgttgagcggtgaaggaaaagcaaaaaatgtgattacctgcccgtatcacgcatgggcattcaaactcgatggcaacctggcccatgcacgtaactgcgaaaacgtcgccaatttcgatagcgacaaagcgcaactggttccggtgcgtctggaagaatatgccggattcgtcttcatcaacatggaccccaacgccaccagcgtagaagatcaattacccggcctgggcgcgaaagtgctggaagcctgcccggaagtccacgatctgaaactggcggcccgctttaccacccgcacgcctgccaactggaagaacattgtcgataactatctcgagtgctatcactgtggtccggcgcatccaggtttctccgactccgtacaggttgatcgttactggcacaccatgcacggtaactggacgctgcaatacggtttcgccaaaccgtccgaacagagctttaaatttgaagagggtacggatgcggcattccacggtttctggctgtggccgtgcacgatgctgaacgtcaccccgatcaaagggatgatgacggtcatttatgaattcccggtggattctgaaactaccctgcaaaactacgatatttacttcaccaatgaagagttaaccgacgagcaaaaaagcctgattgagtggtatcgcgatgtgttccgtccggaagatttacgtctggttgaaagcgtacagaaagggctgaaaagccgtggctatcgtggtcaggggcgcatcatggccgacagtagcggtagtggcatttccgaacatggtatcgcccatttccataatctgctggcgcaggtgtttaaggactaatgacatcggcggcggtattttccgccgctgggctgatttttgatggagtacagcaatgagtgactatcaaatgtttgaagtacaggtgagccaggttgaaccccttaccgaacaggtgaaacgcttcacgctggtggcaaccgatggcaaaccattacctgcgtttaccggaggaagtcacgtcattgtgcagatgagcgatggtgataaccagtacagcaatgcgtatagtctactgagtagcccgcatgacacctcttgttatcagattgccgttcggctggaggaaaacagccgcggcggttcccgctttttgcatcagcaggtaaaagtgggcgatcggttaacgattagtacgcctaataacctgtttgcgctaattcccagtgccagaaagcatctgtttatcgcgggcggtattggtatcacccctttcctgagccacatggcagagctgcaacacagcgacgtcgactggcagctacattactgcagccgaaatccagaaagttgcgcatttcgtgatgagctagtccagcatccgcaggctgagaaagtccatttgcatcatagtagtaccggaacacgactggaattagcgcgattattggcggatatcgaacctggcacacacgtttatacctgtggccccgaggcgctaattgaagcggtaagaagtgaagctgcgcgtctggacatcgccgccgatacgctgcactttgagcaatttgctatcgaagacaaaaccggcgatgcatttaccctggtgcttgcccgttccggaaaagagtttgtggtgccggaagagatgactattttgcaggttattgaaaataataaagccgcgaaagtggaatgtttatgtcgtgaaggggtatgcggaacctgcgaaacagcaatactggaaggtgaagctgaccatcgggatcaatattttagcgatgaagagcgtgccagccagcaaagtatgttgatctgttgtagccgtgcgaagggtaaacgcctggtgttggatttgtaatttgccgaagccggatgtggcgctgagcgcgcccagtccggcttcggaagattttactgcggatattcctgcaataaattgtgtaatgcttccgccatcagctcaccacgccagccggaaatcagctccggcaaattgttctgcggtttcagtttccagtgccagttcagcagttggttgatttgccgacggcttgccagcaattcggcgctgatcttatgcgtttcgctcacgtcagtaatcaggctcttaatcgctttaaacgctttacgataacccggcatgtccatcaggttaagcatcggctgcggtaaggcatcttccggcaatgtctgcgctttttccaccagcgctagcagcgttttaccgtgaaagcggatttcgctaccggataaacccaggctgtccagttcgcctaaacttcccggcatataacgcgctacgctccacaaatgctcttcacgcacgacaaagttcaccgccagatcgcgctctcgcgccttgcgcagtcgccagtcggctaacagttgcagacaggccagttggcgtgtgcgtaattgccaggcattggtgatatcacgccaggcatcttccggcgcaacgacttcctgacgacgcatttgcatcaggcggcattcatccagcgccgcaggtagccagccggaggcctccgtttctaccataagcttggcggtgatcggtaacagataccagacatccgccgctgcgtattcacactgacgttcggtcagcggtctggccagccagtcggtgcggctttcactcttgtccagcgtaacgccggaatactcttccaccatggaagcgaaaccccaactcatcgggcgtccgcagaaggcagcaaggatttgcgtgtcaatcaagggttgtggtaattcgccaaagacattgaggaacacttccagatcttcactgcctgcatggagaaattttgtgatggacggatcgcgcaggatcgctttcagcggactccagtcggtgatcccgagtggatcgattagcgccagatgctcgccatcgaaaagttgaatcaaccccagctgcgggtaataagtgcgcgtacgaacaaattcagtatccagggctatcgccggaaaggcacggacggcttcacacaaagaagccagcgcatcgtccgtggtaatcatttggtaattcaaattgttttctctttagtgggcgtcaaaaaaaacgccggattaaccggcgtctgacgactgacttaacgctcaggctttattgtccactttgccgcgcgcttcgtcacgtaattctcgtcgcaaaatttttccgacgttagatttcggtaactcatcacgaaactccaccagcttcggtactttgtatcccgtgagctgacggcggcaaaaagtcaccagactctcttcggtaaggcttggatcttttttcactacgaagattttcaccgcttcaccactggagccggaaggtacgccaacagccgcgacttcctgtacgccaggatgctgcatgacgacatcttcaatctcgttgggatagacgttaaaaccggaaaccagaatcatgtcttttttacgatcgacaatgcgcaggaatccttcttcatccattaccgcgatgtcgccggtgtgtaaccagccatttttgatgatttcatcggtagcatcgggacgctgccagtaacccagcatcacctgcggtcctttgacacaaagctcacccggttgacctggtggtacttcattatcatcatcatccaccagtttggcttccgtgctcggcaccggcaaaccgatgctaccactatgataatcaatatcatatgggttaacgctgaccagcggcgcacactcggtaaggccatagccttccagcagatactgtccggtcagtttcacccaacgctctgccaccacttgctgcactggcatcccaccgcctgcggaaagatgcagactggagaaatccagctgctggaactctttattgttcagcaacgcattgaacaaggtgttaacgcccgtgatagcggtaaacggatatttcgctaactcttttaccaaccctggaatatcgcgcgggttagtgataagcaggttctgcccacccagttcgataaacagcaggcagttaatggtcagggcaaaaatgtgatacagcggcagcgccgtcaccaccagctctttgcccggatgcaacagcggaccataggtcgcgttaacctgttccaggttcgccagcatattgcggtgagtcagcatcgcgcctttcgccacaccagtggtgccgccggtgtattgcagaaaagctaaatcttccggcaccagttcgggtttgacgtactgcatccggtagccgttatgcagtgcgctacgaaaactaatggcatctggcagatggtatttcggcaccaaacgcttgatgtatttaacaacgaaattgactaccgtgccttttgccgtagatagctgatcgcccatacgggtcagaattacgtgctgaacggcggttttatcaaccactttttccagtgtgtgagcaaagttagacacgataacaatcgcgcttgcgccgctatcgttaagctgatgctcaagctcacgcggggtatacaacgggttaacgtttacgacgatcatcccggcacgcaaaatgccaaacagcgccaccggatattgcaataaattaggcatcatcaacgcaacgcgatcgcctttcttcagccccaacccttgttgcaaataagcggcaaacgcgcgactgcgttcttccagcttgcggaaggtcattacctcccccatattcacaaacgcaggttgatcggcgtagcgcgcgacgctctgctcaaacatatctaccagagattgataacggtcagggttgatctccgtcggaacgtccgcgggataacggttaagccaaaccttcttcaattcttcacctctaaaatgcgtgttcgtcgtcatcgcaaccccaaatgatatacatgccgttaacataatattaactcatcataccagcttgataattacccaacgaaaaggttgcgaagcgcgtcactatttatttttatctttaccgtaagaatgcagaaacagcggaccagccgctgtttctttttctttaaaaacaagcaattattcagttacaactgtttgtactctcgcggggccgggattataccagccccatccgccgtagccatagggccagccacgaccgccataaaaccatggatcaatcggctgaggcggcataatcacctgctgggttaaatgccaacgtttgtaacccgttacttgcatcaccataaatttatagggcgtattgccgattttgccgtcaaccgcaccagtgattggcccgactaccgtaaccagttgtccacggaaatccaccgggtccagaaaaccgttcacatcggcataaatgcgaccgcgagaaggttctcccagcgtcggtctggctccgctgtccagcggtacggtagcaatttccaggcgagttttcccttgctggttttgtaccgcaaccactttgccaccaaagcgtgcctcctgaccaacgtacagctgcggcgcactcatcacccgaactaaatcttgttgcggcgtgggactgctgcctttaatggcgtccggcacagtgacacaaccgctcagcattagcgcaaacgtacctgccagtatgcctttgataacattcttttgaaccgccatggtgcgactcctttttttctcagggcatactcttaagattcattctttgcccggaagtttcttccatgcgacgttgttacgtaaataaaccggttcggcatgttccaccgccaccgttttaccctcagcaaacatctgacacgcaatcggcagcatatcttcagcagcaggcagtaacacttcgccatcgcgcaaaaccagcccgctctctttaccgagatccggccaagcttgccagcccgtccctaccgtcacccattcgccggaaagctgttgcattcgttcatggacgatttcgggtttgagtacggcttcggtttcttcaccgtgccagataccgttttcatcacgctgatattcggcccagtaaacttcgcccattcgcgcgtcaatggctgccagcacgcgggttgcgccgtttttgcgccacgccccttgcgccatcgtcattagcgtggagacgccaatcatcggtaattccgcgccaagcgccagcccttgcgcgatgccaataccaatgcgcacgccagtaaagctaccggggccgcgcccgtaagccagagcgttaatatcagtcagggaagttccgctggtggtcaggatatcctgcaccatcggtaagattcgttgagtatgttcacgagggcaaagctcaaaatgagcgttgacagtaccgtcgttccacagggcgacagagcaggcctctgtcgcggtatcgatagccagaattcgcatgggtcttcgtgcttagatcaataaaaaggcgcgcatcataccatactccgtaacaaattacctggaggatggtatcgcaaggaaacgaaccgcacgggcaatgtcacgggtgcgtggcgcgggcggcagactggcgagaaacgtcgcgccgtaaggacgcatcaccagccgattgtcacaaatcaccagcacgccacgatcgtcggcgtcgcgaatcagtcgccctaccccctgtttgagagtaatgacggcatctggtagttgcacttcatcgaacgggtcgccaccgcgcaaacgacaatcttccatgcgcgcttttaacagtggatcatccgggctggtaaacggcaatttgtcgataattaccaaactcaatgtatcgccacgcacgtccaccccttcccagaaactgctggttgccacaagaagcgcattaccggcgctgacaaattgctgcaacagttgccctttgctggtttccccctgcaacaatacaggaagcgtcatggtagcgcggaactgctcggccagatcgcgcatcatggcgtggctggtacaaagcataaaacaacgaccgttgttagcttcgatgatcggtcgcagcattgccgctaactggcgagcagaacctggctggttggtttgcggcagattgcgcagcacacagagtaacgcctggcggctgtaatcaaatgggctgggcaacagcaagctctcggcctgttcgatgccaagccggctggtgaaatgatgcagatcgtcgttcacgctcagcgttgcactggtgaagatccagctaccgggtttttgcgccattaactctttgaatttatccgccacgctgagcggcgtgagagccagagtaaaatggcggctagtgcattcgtaccagtagctgtagcccggctgattgatctcttttagccgcttcagccgtgtgcgatacaacgtggcgcgctcaaatgccgcatccagcaaggcggaacgccccagactcagtttcgccacgtcataacaaagttccagggtgtcatcgagcagtaaaaatgcccgctgaatttgcggattagctaacagctcacgcaggttaccgcgataacctggctcaccgagttgcagacgaaaatcctgcgcactctgggcaagacgatcagcgcacttttgtaactgctgggtgtcttttaattcggtgcggtaggcgatggtgatgtcttttgccaggtcgagcagttgtcgactggagagactctgaccaaaatactggctggcaatgtccggtagctggtgggcttcgtcgaagatcatgacgtccgcttccgggatcagttcgccaaatccactctctttaaccaccatatccgccagaaagagatgatggtttaccaccaccacatcggcgtccatcgcttttttacgtgctttgaccacaaagcaatctttatacatcgggcagtcgctgccaagacagttgtcgttggtgctggtgaccagcggccacgcctgactatcttccgccacgctgacgcaggtgctgatatcaccatcgactgtttgattagaccaggagcgcagcaggatcacatcgcttaagatttgtaccggcagatcgccccccgccagcgcctgctgttcgagacgttcgaggcagaggtagttactgcgccctttcagcagcgccacgttgcccgtatatttcaatgccttactgactgttggcaaatcgcggctgtagagctgatcctgcaacgctttactgccggtgctgataatgactttctttttcgcccgcagcgcaggagccaggtaagcgtaggttttgcccgtaccggttcctgcttccaccaccagcggctggcctttttctatcgcctgggtgacggctaccgccatctgtcgctgtggttctcgcggcttaaagcctggtatcgctttcgccagctgaccgtctggtgcaaaatcgtccgtcacactaccccctgttgatttgaacagggattatgtcaggatgagggcgctttcgccagttgaagtggtgacggcgacctcacattgtggcagtctttgcagcacgaaaatggaagtataatgaggacaaaatgatgactatcgttcgtatcgatgctgaagcccgctggtctgatgtagtaatccacaacaacacgctctactacactggtgtaccggaaaacctcgacgccgatgcctttgagcaaaccgccaacacgctggcacagattgacgccgtgctggaaaaacagggcagcaataaaagcagcattctggatgccaccattttcctggccgataaaaacgacttcgcggcgatgaataaagcgtgggatgcttgggttgtcgcgggtcatgcgccggtgcgctgcacggtacaagcgggtttgatgaacccgaagtataaagttgaaattaagattgtggctgcggtgtaagctttatcgaagcaaaataagtcagacgataatttatcgataatactggtcggttttacataaatcgaccagagaataagatattactgttgatgcttctgctaattcattatttatatttataatttcaattttatctataaaactaactatataaataaacataaacatgccgttgtgttcgccctttgattagcaactctggttttctttcttagctgaacaatctggttatagcgtgcggactgaccgttaaatttctccatcttactggataacacaccatgagctgctacctttaaaacacctgaatgtcaacaggttaactcgtgccatatcgttataatccctttgatattagatgcaaattaaggtcatatatagccttatcgataacatggttaattttaaggataagaatatgcctgctgtaatagataaagccctggatttcattggtgccatggatgtaagtgcgccaacaccaagtagcatgaatgaaagcacggcgaagggaatctttaaatatttaaaagaactgggagtacccgcgagtgccgctgatattacggcgcgagctgaccaggaaggctggaaccctgggttcacggaaaaaatggttggatgggcaaaaaaaatggagacaggtgaacgttctgtgattaaaaatcctgaatactttagtacatatatgcaggaagaactaaaagcactggtctgagttaaatttatatcagcataaatgggtcaggacgcttttaatcacatataaaaagcgtcctttttctcacaatcaaatgatcatcggcttctataacgaaatcgatacggattagtgtgttactcgtcttcatcctcaaaacgcgccacgattcgctcgccggagtggttggcacgcagctcttctgccaccagcgcgattgcctggccgctgctcatcccttgtgccatcagttcctggatccgctcgacagctttttgctgctgttcatgggtgagactaggtaaacctgcaaacattgttaactcctgctaaattgttggcgctaattatttcatgctacccggcacatagccagtagagtcaggactgatgaagacgttatctcccgctgtgattactttactctggcgtcaggacgccgctgaattttatttctcccgcttaagccacctgccgtgggcgatgcttttacactccggctatgccgatcatccgtatagccgctttgatattgtggtcgccgagccgatttgcactttaaccactttcggtaaagaaaccgttgttagtgaaagcgaaaaacgcacaacgaccactgatgacccgctacaggtgctccagcaggtgctggatcgcgcagacattcgcccaacgcataacgaagatttgccatttcagggcggcgcactggggttgtttggctacgatctgggccgccgttttgagagtctgccagaaattgcggaacaagatatcgttctgccggatatggcagtgggtatctacgattgggcgctcattgtcgaccaccagcgtcatacagtttctttgctgagtcataatgatgtcaatgcccgtcgggcctggctggaaagccagcaattcagcccgcaggaagatttcacgctcacttccgactggcaatccaatatgacccgcgagcagtacggcgaaaaatttcgccaggtacaggaatatctgcacagcggtgattgctatcaggtgaatctcgcccaacgttttcatgcgacctattctggcgatgaatggcaggcattccttcagcttaatcaggccaaccgcgcgccatttagcgcttttttacgtcttgaacagggtgcaattttaagccttagcccagagcggtttattctttgtgataatagtgaaatccagacccgcccgattaaaggcacgctaccacgcctgcccgatcctcaggaagatagcaaacaagcagtaaaactggcgaacagtgcgaaagatcgtgccgaaaatctgatgattgtcgatttaatgcgtaatgatatcggtcgtgttgccgtagcaggtagcgtaaaagtaccagagctgttcgtggtggaacccttccctgccgtgcatcatctggtcagcaccataacggcgcaactaccagaacagttacacgccagcgatctgctgcgcgcagcttttcctggtggcagtataaccggggctccgaaagtacgggctatggaaattatcgacgaactggaaccgcagcgacgcaatgcctggtgcggcagcattggctatttgagcttttgcggcaacatggataccagtattactatccgcacgctgactgccattaacggacaaattttctgctctgcgggcggtggaattgtcgccgatagccaggaagaagcggaatatcaggaaacttttgataaagttaatcgtatcctgaagcaactggagaagtaagacgtggaataccgtagcctgacgcttgatgattttttaagccgctttcaacttttgcgcccgcaaattaaccgggaaaccctaaatcatcgtcaggctgctgtgttaatccccatcgtccgtcgaccgcaaccggggttgttgctgactcagcgtagcattcatctgcgtaaacacgctggacaagtggcattccctggaggtgcagtcgatgacacggacgcaagtgctatcgccgccgcgctgcgcgaagctgaagaagaggtcgctataccgccttccgccgttgaagttatcggcgtgctgccgcccgtcgatagcgtcactggctaccaggtaaccccagtggtcggcattatcccgcccgatctgccgtatcgcgccagtgaagatgaagtcagcgcggtgtttgaaatgccgctcgcccaggcattacatctgggtcgttatcaccctttagatatctaccgccgtggtgatagtcatcgggtatggctgtcctggtacgaacagtattttgtatggggaatgaccgcaggcataattcgtgagctggcgctgcaaattggtgtgaaaccctgactatacttatctttacatctacaaaacactacttgagacaatcatcgcaatattagttaaatcgcggtttttgattagtttaattcatgtgaatagttaagccagtcgccgcgttccctcttacactatgcgctgttattagttcgttactggaagtccagtcaccttgtcaggagtattatcgtgattagtctattcgacatgtttaaggtggggattggtcccagttcttcccataccgtagggcctatgaaggcaggtaaacagttcgtcgatgatctggtcgaaaaaggcttactggatagcgttactcgcgttgccgtggacgtttatggtagtctgagcctgacgggtaaaggccaccacaccgatatcgccattattatgggtcttgcaggtaacgaacctgccaccgtggatatcgacagtattcccggttttattcgcgacgtagaagagcgcgaacgtctgctgctggcacagggacggcatgaagtggatttcccgcgcgacaacgggatgcgttttcataacggcaacctgccgctgcatgaaaacggtatgcaaatccacgcctataacggcgatgaagtcgtctacagcaaaacttattattccatcggcggcggttttatcgtcgatgaagaacactttggtcaggatgctgccaacgaagtaagcgtgccgtatccgttcaaatctgccaccgaactgctcgcgtactgtaatgaaaccggctatagcctgtctggtctcgctatgcagaacgaactggcgctgcacagcaagaaagagatcgacgagtatttcgcgcatgtctggcaaaccatgcaggcatgtatcgatcgcgggatgaacaccgaaggtgtactgccaggcccgctgcgcgtgccacgtcgtgcgtctgccctgcgccggatgctggtttccagcgataaactgtctaacgatccgatgaatgtcattgactgggtaaacatgtttgcgctggcagttaacgaagaaaacgccgccggtggtcgtgtggtaactgcgccaaccaacggtgcctgcggtatcgttccggcagtgctggcttactatgaccactttattgaaagcgtcagcccggacatctatacccgttactttatggcagcgggcgcgattggtgcattgtataaaatgaacgcctctatttccggtgcggaagttggttgccagggcgaagtgggtgttgcctgtagtatggctgctgcgggtcttgcagaactgctgggcggtagcccggaacaggtttgcgtggcggcggaaattggcatggaacacaaccttggtttaacctgcgacccggttgcagggcaggttcaggtgccgtgcattgagcgtaatgccattgcctctgtgaaggcgattaacgccgcgcggatggctctgcgccgcaccagtgcaccgcgcgtcagcctggataaggtcatcgaaacgatgtacgaaaccggtaaggatatgaacgccaaataccgcgaaaccagtcgcggtggtctggcaatcaaagtccagtgtgactaatacttcttactcgcccatctgcaacggatgggcgaatttatacccgctttctcgtctgctgtaatattccccactacacttccactgttgcgtcaggcgtttgtcgccatacgcttacagggtggcccgcatgcaaaaagcacaacggatcattaaaacctatcgtcgtaatcgaatgattgtttgtacgatttgcgcactcgttacgctcgctagcaccctgagcgtgcgatttattagtcagcgtaacttaaatcaacaacgggtagtacaattcgccaatcacgctgtagaggaattagataaagtactgcttcccctacaggcaggtagcgaagtcttgcttccgctgattggtctgccctgctctgtcgcccatttgccattacgtaaacaggcggcaaaactccaaactgtgcgatccattggcctggtgcaagacggcacactttattgctccagcatttttggttatcgcaatgtgcccgtcgtggacattctggctgaacttcctgcaccgcaaccacttttacgcctgacgatcgaccgtgccctgattaaaggcagtccggttttgattcaatggacgcctgcagcgggcagtagcaatgctggggtcatggagatgattaacatcgacttactgacggcaatgctgcttgagccacaactgccgcaaatcagtagcgccagcctgacggtggacaaacggcatttgctctatggtaatgggctggtagattcccttccgcaacctgaagacaatgaaaactatcaggtttctagccaacgctttccttttaccattaacgttaatggtccgggggctacggcgctggcatggcactatcttccaacacaattaccgctggcggtgctgctaagtttactggtgggctacatcgcctggctggcgaccgcttaccgaatgagcttttcccgcgaaatcaatctgggcctggcgcaacatgagttcgaattgttctgtcagcctttgcttaatgcgcgcagccagcaatgtattggtgtagagattttgctgcgctggaacaatccgcgtcagggctggattagtccggatgtgtttattcctatcgcggaagaacatcatttaattgtgccactgacccgctatgtgatggcagaaaccattcgtcagcgccatgttttcccgatgagtagtcagtttcatgttggcattaacgtcgcacccagccattttcgccgtggtgtgctgataaaagatctcaatcagtactggtttagcgctcacccgattcagcaactgatcctcgaaatcaccgaacgcgatgccttactggatgttgattatcggattgcccgcgagctgcatcgtaaaaacgtcaaactggcgattgatgacttcggcaccggcaacagcagcttttcctggcttgaaacattacgtcctgacgtgctgaaaattgataagagttttaccgcagctataggttctgacgcggttaacagcacggtgaccgatatcatcatcgcgctggggcaaagactgaatattgaactggtggcggagggcgtggaaacgcaagaacaggcgaagtatttgcgccgtcatggcgtgcatattttgcaagggtatttgtacgcacagccgatgccgctacgtgattttcccaaatggctggcgggcagccaaccgccgcccgcccggcataatggacatatcacgcccattatgccgttacgttaacgcttactcatcttcatcgtgcgccggttgctctttaacaatgcgaaccagatcaacacgataatcattggcttcaatgatggtgatatgcagtggccctacatcaatcacatcgcccacacggggaatgtgaccatttgcgctgatcacgaggcccgcgaccgtcgcgatatcatcgtcatcggcaaggtgctcaacatcaagcgcctgctgcaaggcatgcaaatctgtaccgccttttaccagccagccgtcaccatcagtaatgatttccggcgtttcgtcagcgtccgggaattcacccgcaatggcttccagcacatccagcggcgtgaccagaccttgtaccacaccaaactcgttggtcacgataacaaagctcccgcgagcacgacgcagcacgcccaacaggttgatcggatcgagggtttccgggacgataatcgccggagacgcgctagcaatcgccgccacatcaacgccctcttccagcgccaccagcagttctttagcacgtacaataccgatgatttcatccagttcaccgcgacataccgggaacagactgtgcggactagagagcagttgctcgcggatttcatcgaccccgagattagcgtcaacccagcttatttcaccgcgcggcgtcatgatcccgcgcagagaacggctcgccagcgtcagtacgccgttaatcatgtaacgttcttcttcggcaaatgcaccttccgggatcggcatcggcatcgggttatcggcatcgtgctgaacattggcctgacgtttcccgcccatcaaacgcaggatggcatcggcagtacgcgctcgcagcggcaaagtgctctggtggcgaataaagttgcgacgcgcaatctggttaaacacttcgatgatgatgctgaagccaatcgcggcatacaggtaacctttcggaatgtggaaaccgaaaccttctgccaccagactcagaccaatcattaacaggaagctcagacagagcaccaccaccgtggggtgctggttaacgaatcgcgtcagcggtttggatgccagcaacataaccgccatcgcaatcactaccgccgccatcatcaccggcagatggttaaccatccctactgcagtaattaccgcatccaagctgaagacggcgtcaaggatgacaatctgtgtgacgaccacccagaaactggcgtagcctttaccgtggccggaatcatgatcgcggttttccagccgttcatgcagttcggttgttgctttgaacagcaagaatatccccccgaacaacataatcaggtcgcgtccggagaaggagaaatccatgacggtaaatagcggtttggtcagcgtgaccatccaactaatcaggctcagcagccccagacgcataatcagcgccagacttaaccccagcaaacgcgctttatcgcgttgttttggcggcagtttgtcagcaagaatggcgatgaagaccaggttatcgatacccagcacaatttcgagaacaacaagcgtgagtagccccgcccaaatactggggtccattaagaattccatgacaagctcctgcttaaggaatagctattcgacgccagaaataatgcaggcgtaacgacaaaatgcaaacgaaaggtgcggcatagagtgccagaaaggcaggcgttaaaaggcctgatgctgaaatgacgtcggtgacgatccatactgcgggctactgccctatactccatggttgttaaacgggagttaaacatatcagagacgcctctgatttggcaaagatttaccttcctttgcaaacgaatgtgacaaggatattttacctttcgaaatttctgctaatcgaaagttaaattacggatcttcatcacataaaataattttttcgatatctaaaataaatcgcgaaacgcaggggtttttggttgtagcccttatctgaatcgattcgattgtggacgacgattcaaaaatacatctggcacgttgaggtgttaacgataataaaggaggtagcaagtgaccattgctattgttataggcacacatggttgggctgcagagcagttgcttaaaacggcagaaatgctgttaggcgagcaggaaaacgtcggctggatcgatttcgttccaggtgaaaatgccgaaacgctgattgaaaagtacaacgctcagttggcaaaactcgacaccactaaaggcgtgctgtttctcgttgatacatggggaggcagcccgttcaatgctgccagccgcattgtcgtcgacaaagagcattatgaagtcattgcaggcgttaacattccaatgctcgtggaaacgttaatggcccgtgatgatgacccaagctttgatgaactggtggcactggcagtagaaacaggccgtgaaggcgtgaaagcactgaaagccaaaccggttgaaaaagccgcgccagcacccgctgccgcagcaccaaaagcggctccaactccggcaaaaccaatggggccaaacgactacatggttattggccttgcgcgtatcgacgaccgtctgattcacggtcaggtcgccacccgctggaccaaagaaaccaatgtctcccgtattattgttgttagtgatgaagtggctgcggataccgttcgtaagacactgctcacccaggttgcacctccgggcgtaacagcacacgtagttgatgttgccaaaatgattcgcgtctacaacaacccgaaatatgctggcgaacgcgtaatgctgttatttaccaacccaacagatgtagagcgtctcgttgaaggcggcgtgaaaatcacctctgttaacgtcggtggtatggcattccgtcagggtaaaacccaggtgaataacgcggttagcgttgatgaaaaagatatcgaggcgttcaagaaactgaatgcgcgcggtattgagctggaagtccgtaaggtttccaccgatccgaaactgaaaatgatggatctgatcagcaaaatcgataagtaacgtattgtgttgattatcactcagttttcacacttaagtcttacgtaaacaggagaagtacaatggagattaccactcttcaaattgtgctggtatttatcgtagcctgtatcgcaggtatgggaagtatcctcgatgaatttcagtttcaccgtccgctaatcgcgtgtaccctggtgggtatcgttcttggggatatgaaaaccggtattattatcggtggtacgctggaaatgatcgcgctgggctggatgaacatcggtgctgcagttgcgcctgacgccgctctggcttctatcatttctaccattctggttatcgcaggtcatcagagcattggtgcaggtatcgcactggcaatccctctggccgctgcgggccaggtactgaccatcatcgttcgtactattaccgttgctttccagcacgctgcggataaggctgctgataacggcaacctgacagcgatttcctggatccacgtttcttctctgttcctgcaagcaatgcgtgtggctattccggccgtcatcgttgcgctgtctgttggtaccagcgaagtacagaacatgctgaatgcgattccggaagtggtgaccaatggtctgaatatcgccggtggcatgatcgtggtggttggttatgcgatggttatcaacatgatgcgtgctggctacctgatgccgttcttctacctcggcttcgtaaccgcagcattcaccaactttaacctggttgctctgggtgtgattggtactgttatggcagtgctctacatccaacttagcccgaaatacaaccgcgtagccggtgcgcctgctcaggcagctggtaacaacgatctcgataacgaactggactaacaggtgagcgaaatggttgatacaactcaaactaccaccgagaaaaaactcactcaaagtgatattcgtggcgtcttcctgcgttctaacctcttccagggtagttggaacttcgaacgtatgcaggcactgggtttctgcttctctatggtaccggcaattcgtcgcctctaccctgagaacaacgaagctcgtaaacaagctattcgccgtcacctggagttctttaacacccagccgttcgtggctgcgccgattctcggcgtaaccctggcgctggaagaacagcgtgctaatggcgcagagatcgacgacggtgctatcaacggtatcaaagtcggtttgatggggccactggctggtgtaggcgacccgatcttctggggaaccgtacgtccggtatttgcagcactgggtgccggtatcgcgatgagcggcagcctgttaggtccgctgctgttcttcatcctgtttaacctggtgcgtctggcaacccgttactacggcgtagcgtatggttactccaaaggtatcgatatcgttaaagatatgggtggtggcttcctgcaaaaactgacggaaggggcgtctatcctcggcctgtttgtcatgggggcattggttaacaagtggacacatgtcaacatcccgctggttgtctctcgcattactgaccagacgggcaaagaacacgttactactgtccagactattctggaccagttaatgccaggcctggtaccactgctgctgacctttgcttgtatgtggctactgcgcaaaaaagttaacccgctgtggatcatcgttggcttcttcgtcatcggtatcgctggttacgcttgcggcctgctgggactgtaagactgttgtacactaccggggccttttggccccgtttttttatctggaggattaatgacaatcacggacctggtactgattcttttcatcgccgcactcctggccttcgcgatctacgatcagttcatcatgccccgccgtaacggccccaccctgctggcaattcctttgctccggcgtggtcgcatcgatagcgttatcttcgtcggattgattgtcattcttatctataacaacgtcacgaatcatggtgcgttaataacgacatggttattaagcgcactggctctgatgggtttttatatattctggatccgcgttccgaagatcatctttaaacaaaaaggttttttcttcgccaatgtctggattgaatatagccgaatcaaagcgatgaacttgagcgaagatggcgtgttggtgatgcaattagaacagcgtcggctgttaatccgcgttcgaaatatcgacgatctggaaaaaatttataagcttctcgttagtactcaataagttatgaatttagccaaagctatgtttagtgtatttttaataatcagacatagcttaggctatattacctcttcccttatttgttatttattttaacgtttcattgatatataaatccaaatgaaaatcgttatcaataaagcaatgaaataatatattccaacagttgttttatattctcaaaatatgttaaggttgcgccctcatttggggagtagccgatttccagattccggaaatgtacgtgtcaacatactcgttgcaaaacgtggcacgtacggactgaatactttcagtcaggcgagaccatatgcacatcaatcgctatgcctgcatgaacgcgaaaaccatcacggcttgttgttcatgtatgcatgtttgctgggggcgatgatgtgttttatggataccccggtcaggacattgtcatgaatatcactgctactgttcttcttgcgtttggtatgagcatggatgcatttgctgcaagtatcggtaaaggtgccaccctccataaaccgaaattttctgaagcattgcgaaccggccttatttttggtgccgtcgaaaccctgacgccgctgatcggctggggaatgggcatgttagccagccggtttgtccttgaatggaaccactggattgcgtttgtgctgctgatattcctcggcgggcgaatgattattgagggttttcgtggcgcagatgatgaagatgaagagccgcgccgtcgacacggtttctggctactggtaaccaccgcgattgccaccagcctggatgccatggctgtgggtgttggtcttgctttcctgcaggtcaacattatcgcgaccgcattggccattggttgtgcaaccttgattatgagtacattagggatgatggttggtcgctttatcggcagtattattgggaaaaaagcggaaattctcggcgggctggtgctgatcggcatcggcgtccagatcctctggacgcacttccacggttaataagaacgctgccagaggtgaatattaaagtccgtctggcagtcgaacacttcttttgctgccagtgtttgccagacttctggcttcgcacgccaggcaaacggcgtcatctgcaataatgcgacggcttcatcaccgcgaagacgcatcggataacacaactccgcactctgctgtaatgtaaaaccttccagttgttctgcatgaggtgcatgaagatgtacttcattgtaaatcagccccttcagctccatcaaatgtcgcggtcccggcgtggcagtaatgacccagccgccgggcttcactactcgtgctaattcttctgctttacacggcgcgtaaatacgtattatggcgtccatactggtatcggaaaacggcaaacggtggctggaagcgacacaaaaagtgacctgcggatagcgtttcgccgccgcttttatcgctaccttgctaacatccagaccaaacgtggtgatttcgggcaacgcatcggcaaatgcgtgtgtgtaatacccttcaccacagccaatatccagcaccgccgtggccttatcatcaagccgttccctcagttgggcgacaattgcatcacgcagcggctgataatgtccggcatctaagaatgcgcggcgtgcttgcatcatttccgcgctgtcgcccggatcacgagaccgtttatgctgaacgggcagcagattgacatacccttctttcgccatatcaaactgatgtcgctggggacagatatagctgtttttttcacggctaagaggctgatggcaaagtggacaggaaaaagacatgacaactccggcaggatactaaaggccgcaagtgtaacgcgaatcacgcggcgggcaaatatccgaacgccaggagcgaagataaagcatagtaaaaagcctcgcattcgacgaggctttatagcgagattgaagcgtattcacacttcagatcagtggattcgatcagatagctgttacgttaacagctgccggacctttctggccgtcctgaatttcgaactcaacgttctgaccttcagccagagttttgaagccattaccctggatagcggagaagtgtacgaacacatctttgctgccatcagccggagtaatgaagccaaaacctttagactcgttgaaccacttaacctgacctttaatctttgccatttgaaaaattccttagattgttttcttcgcccgcaggcataacatagataaaacactcacattactgcaactggcaccaatataaggctcggcagagaagcggtattcaacgtcaacgtgtttactcaggacttctttactgaaaatgccacacataaacagaactgtacctcgtttaacccgaaatctgttatcacatacaacgttaattatggcaagccatttttaaacatgtctcgatcagacgcacaaatctcgatacgtcttccactttttttgcacacttatgcaacggaatacgcgccgatatatcattgtgcttaaccttgccagttcaggcagatacttaaactggcgtattttctaacatagttcaataagttcagttgttccaggccagtgggagaagttattacatagtgcgtgcaatatcacattttttgctatgcaatgaataaaaagttatatcactttttctcataaaacagtcagttaacggctattaattaccctaaagagaagtcaatccccaaagggattgtaaatttaaaataagaaaaattgatgaatgagcaaaaaaatcaagagagaaacgtttcgctaataaataataccacgcttaatcacaaatccgatgtaaacatcctaataaattaatggggtaaatatctttttctgatatcccgttacgcaaataaataatatgataattatttgaagtcagaccagagttttaatttgaagcagttgcaccatgacagtgcgtataatcaggatgaattgagtaacccttcaacgacggggttactcaagattgaggaaggattatcgttcggcgaccagacgaataatatcttcgtcttcaacgcttttttgactctcaacggtctttttatctgctttctctggttcgtttgcttcgcacaaacgacgtaacagtgcattttgacgtttttgctgatccagcaacgcctcaagcagttcaatctgttcgttagtccgactactggcacgattgataaaaaaccacaagatgagcccgataagaagaaccaccacgcttacaaccaaagacgcaatgttcatcacgccactatttacaacttcgttcatttcaccacctctgagtagaggcgctattctaccactgctggagaggaagaaaatctagtgctgaaaaaatgatatcaccacgggataaactggttaatggcacaaattccgctgaaaaattgtacatcctgatcgcacatcatgttgaatacctgcgcccaaagcagcaagcaagccaacaccacgacaaccagaacgacccatcgaaactttttcactccaatctccgtttcacctaccttatgtcattaaactagcatgcgttagttaaacagcgcctaactatgtcgatattcgtgctttttcggaatgagtcgcttgcttcagcgcatattgccgctacgattaagcgaacataaaaagagaagaggttgtaatgcgattcatcattcgcacagttatgctgatagcactggtatggataggattattactcagcggatatggcgttttgattggaagcaaagagaatgccgcaggattaggtttgcaatgtacctatctgactgccagaggcaccagcacggtacaatacttgcacactaaaagtggttttttggggataacagattgcccgctgttacgcaaaagcaatatcgtggtcgataatggttaagggcaataaataaccagattctcactcctgagtaaaatactcttatagcaagcgcgtttaatataacgccaccttcaactttatttttctcatgctaaataaagaacctgtctgtttgatattccgacaggttcttactctcatcagaacggatagtcgtgataacccatttgggcagaaattttgcgcgctgcggtatgcaacattgcgacatattcctgtaaacgctcttcagagaaacgcaacgtcgggaaggagatgctcaaaccggcaatgaccacgccaaagcgatcaaataccggtaccgcaatgcatcgcagcccttcttcctgctcttcattatcttcgccatacccctgctcgcgcacctggtccagaacgggtaataacgcttctgtactggtgatggtccgctcggtactgcgtttatactccacgccctcaagaatttgcttcacttcatcgcgatcgcgccatgccagcagtaccttaccaatcgcggtgctgtacagcggattacgacgcccaatccgactatacatgcgcaaattgtacatagagtcaattttgtgaatgtaaacaatactgtcttcgtccagtgcgccgaggtggatagtttctttggtcaggcgggagagctcacgcatctggatatctgcgctacgaattaaatcgacgttttgtaacgcgcgagcgcccagttcaaacaatttcagggtcagggaatatttctcgctctccccttcctgcgccacataacctaaggttttcatggtctgtaaaaagcgataaacggtgcttttactcatcatgacgcgctggctcagctcggttatccctatttcgcgctcttcacccagcgcctgcaaaatgccaaaaacttttagcacggaagatacagaatcaggctgtttatccagatctgcgttagccatttatcacctcattgcgagtgttttataaaaatcagaactgttttttattataatttcgcaccagggtggtcgcaatccatcttttgccggttagttacaattctgcgacatccaccgtgaatatcagtgctagaatcatacccctgttgattattcaccaaagatataaaattcctatgccaaaagttcaggccgacggcctgccattgccccagcgatacggtgcgatattaaccattgtgattggtattagcatggccgtccttgacggcgcaatcgccaacgtcgccctgccaacaatcgccacggaccttcatgccacgccagccagttccatctgggtagtgaacgcctatcaaatcgccattgtcatctccctgctcagctttagctttctgggcgatatgtttggctatcgacgtatttataaatgcggtctggtcgtttttctgttgtctagtctgttctgcgccctttctgatagcctgcaaatgctcacccttgcgcgtgtcatacaaggtttcggcggtgcagcgttgatgagcgttaataccgcacttatccgcctgatctatccacaacgttttctgggtagagggatgggcataaacagctttattgttgccgtctcttctgctgccgggccgacaattgctgcagcaatcctctccatcgcatcctggaaatggttatttttaatcaacgtaccgttaggtattatcgccctgcttctggcgatgcgttttctgccacccaatggttctcgcgccagtaaaccccgtttcgacctgcccagcgccgtgatgaacgcgttaaccttcggcctgcttatcactgcgttgagtggtttcgctcaggggcaaagcctgacgttaattgctgcggaactggtggtaatggttgttgttggtattttctttattcgccgccagctttctcttcccgtaccgctgctaccggtggatttactgcgtatcccgctgtttagtctttctatttgcacatctgtttgctctttctgcgcacaaatgctggcaatggtttccctgcccttttacctgcaaaccgtgctcgggcgtagtgaagtcgaaacaggtttacttctgacaccgtggccgttagcaacgatggtgatggctccgctggcaggctatttgattgaacgcgtacatgcaggattgctgggggctttagggttgttcatcatggctgcggggcttttttccctggttctgctgcccgcgagtcctgcggatatcaatattatctggccgatgatcttatgtggtgctggatttggcttattccagagtcccaataaccacaccattattacctccgcgcctcgcgaacgtagcggtggagccagtggcatgttaggaacggctcgtctactgggtcagagtagcggcgcggcgctggtggcgctgatgctaaatcagtttggagataatggtacacacgtcagcctgatggctgcggctattctggcagtgattgctgcctgtgtcagtggtttacgtatcactcagccacgatccagggcataaaaaaagcgcgtcgatcaggacgcgctttttagtatttacttcatattacttcaggtattcacccgtacgcagagcttcaattcgtttatccagcggcgggtgggtcatgaacaactcactgaggcttttgctcttaccgttaatgcagagagccatcatgctggttgcttcttgcggttcatagctggttttcaggcgctgcagcgcggcaatcattttctcgcgaccaaccagttttgcgctaccggcatcagcatggaattcacgatgacggctgaaccacatggtgataatgctcgccagaataccaaacaccagttccagaaccgttgcaaccgcaaagtagatcagcgggttgccgttgctctcttcaccttcatcacgatttccgcccataaaacccgcggcaagctgcgccagaatacgggaaataaagataacgaaggtgttcaccacgccctgaatcagcgtcatggtgaccatatcaccattggcgatgtggctgatttcgtgagcaattaccgcctcggcttcatccgggctcatgttctgcagcaaaccggtgctgacagcaaccagagaggcatcacggcgcgcaccggttgcaaaagcgttgatgtccggcgcatggtagatagccacttgcggcatagcgatccccgcctgacgagcctgggttgctacagtattgaccagccaacgttccctttcgttacgcggttgctcgatcacttccccgccaacagatcgtaatgccatccatttggacatcagaaggctaacgaaggaaccaccaaaaccgaacagcaaggccatgatcatcagcccctgaacgctgctgctctgtatccctgtcaggctcagtaccagcccgaaaacgaccattacggccaggttcgttagcaggaagagcgcgattcgcatcataattttctttttacctcagtttaacaaaacgcaatatgcgatacccacatcgtatgggttacgcgactattttcaagtctggatagtgcgtaagtcaccagaaagacacaactttacattttgtagcatctgatttacggcatcttgtcgctgttaaaaaatcaggcacaatttcttgtgcctgattgatattacttgacgggagcgggttgttccgcgggtctggctttttcaagcttcgccagatcgagtgcgatattcaccgtctcatccagataaggatccggctcctggtaatctttcggtagatcatccagtttcttcaactccggtttaccttcgcgtttaaagcgttcgttcaaacgcgccagacgcgtcgcatcatcttcattattctctttctcacgcacagcgtaattcagagaaacgatattgcgcttgtccttcatagcgttgaagcgcgcgatatccttcatgatgttctggaactcaggatctttcgcgatacgcgcattatgttccttcagcagctccggttcaaaggccgttaaatctccacttttcacataagtcgcggcatcaatgctatcccacggcagcgcgttatcttcgaatttctcacccgtttccgtttcttcattacccgtcggcatgatgatgtctggcgttacgcctttacgttgcgtactgccgccgttaacgcgatagaatttctggatcgtgtactgcacagaacccagcgctggccattcaggacgtaacatctgatcgtaaatacggttcaaactacggtattgctgaacggtgcctttaccaaacgtcggttcacccacaaccagcgcacgaccgtaatcctgcattgccgcggcaaagatttcactagcgctagcactgaagcggtcaaccagcaccaccagcgggcctttatagaaaacctgtccgtcggtatcgctatcttcacgaaccttgccgttgttatcgcggacctgaacaatgggacccgcaggaataaacagaccggagaggcttacggcttcagttaacgccccaccgccattgctacgcaggtcgatgatgacgctgctgacattctgtttttccagtttctgcagttgcactttgacatcgtctgtcaaacccacatagaagcccggaatatccagcacgccgactttctctttaccgacggtcttcacgctcattttaaccgcgcggtcttcgagacgaatacgttcacgggtcaacgttacagtacgggtcttggtccctttaccagcaggtaaaatttccagacgaactttactgcccttcggccctttaattaaggcaaccacatcatcaagacgccagccaatcacgtcaaccatcggcttgcctgtttgaccaacaccgacaattttgtcaccaacgctgatagctttactcttcgctgccggaccacctgccaccatgctattgataacggtgtagtcatcatccatttgcagcactgcgccaataccttccaggctcaaactcatttcagtgttgaactgttcggtattacgcggggaaagatagttggtatgcgggtcgatttcacgcgcaaacgccgtcattgccaggctgaaaacatcttcgctgttggtttgcgccagacgacgaatggcaaatttgtagcggcgagtcagggtttcacgaatttctttatccgtttttcctgtcagcttcaggcttaactcgtcgaatttgactttactgtcccacagcgcgttcaactcagcctcgtttttcggccagggcgctttgctgcggtcaaggttataagtgtcgttgccggtgaaatccatcggcttttccagtacgctcaaagcgtactggtaacgctcaaaacggcgcttttgcgccagattgtagagatcgtagaaaacgtcgagtttgccactacgcagttcatcgcctaactcggttttctttttcgcgaactgttcaacatcgcttgccagcagcacgttgtggctgtaatcgagcagattcaggtagcggtcaaagattttggcgctaaatgcctgatcgaggtcgaactggcgataatgagaacgggtgaagcggctcgttacgcgctcacttaccgtcgcatgctgcgtctcttcctttaataccggaatttgatcagcacgcgtgatatcttctacagcgaaggtctggcctgctattgcaagcaggccagctaacgcggtaagcctaaaaaacatgttcatgcctggcccggcctccgtttcagaacaccaggtgttctgcgcgcacaatcaaagacataccgctattcagctggacgcggacgccgtctttggtgatttctaatacggtggcatccatcgcgttttgacccgctttcaccttcagggcttgtccgacagtcagagcactaatgtcagaaaccggggtgtgctgttcttcgcgaggtgcttttactgtttttggcgctttctctaccggcttttgcgcacgaggtttacgttcagcgccttctttgcggcgtggcgtagtcggacgtggcttgcgttcgcggcgcggtgcgtcttctttctcaccagcagttgcggcagcttcgcgttttttcgcttgctgttcagcacgctgtgcctgaacacgcgctttcgcttcttcaagctgcttgcgagcatgctctacatgttgctcgtccagctcaccgcatgggttgccgtcaagatcgacacgcgttgcgccgggtttaacaccgtaaagataacgccagctgctagtgtagagacgtaaagcggatcgcaattgcgttttgctcaggttcatttccccagcaacacgatcgaccaaatcctgaaaaataccgattttcagcggacgcgcttcaccttccgcactgaaacagtggggaaaacgttcggccagaaacgcgattacttctttactgctattcaacttaggttgattttccatgaaatttcctgattacaacggacgtagccaacaagcgcaggcatgaacaggcgtcattataatgacgctatcagtaaatgctacgttatccgttgattatcctgcgacgctcgcaaagaattttttgtaatccgtcgttgcaagcactttttcaagctgtgccacaagctgacgtaagccttgctcgtcctcgtctgtaaagcgaccgaagacggtactatcgatgtcgagaacaccaataatctgatttttcaccaccagcggcagaacaatttcagaattactcgccgcatcacaggcaatatgcccgtcaaacacatgaacatcctcgatacgctgcacttgattgcgggcaaccgcagtgccgcacacgccgcgcccgacgggtatccggacacaggcaattttgccctgaaatggtccgagtaccagtgtatcgtcctcaagcaaataaaaacctgcccagtttatgtcagtgagacgctcatataacaacgcactggtgttcgcaagcgttgccagaaaactggtttctcccgccatcagcgcgttaaagtcgcgatttaaatccgcgtaaaattctgttttgttcattatataatcacttggttgtcttacctggatctgccagcctattaaaataagcattaaatgcgttaatgctcaagatcattcccatcatgggttaagattaatgttaattcttattacatttggcacgtcatggctcttaacacaccacaaattacgccgacaaaaaagataacagtgagggcaatcggcgaggaactgccgcgtggtgattaccaacgttgcccgcaatgtgacatgctgtttagcctgcccgagataaattctcatcaaagtgcctattgtccgcgctgtcaggcaaaaattcgtgacgggcgcgactggagcctaacgcgcctggcggcaatggccttcaccatgctgttgcttatgccgtttgcctggggcgaaccgctgttgcatatctggctgttaggcattcgtattgacgccaacgttatgcaaggcatctggcaaatgaccaaacagggcgatgcgataacggggagcatggtctttttctgcgttattggtgccccgctcattctggtgacctccatagcttatttatggtttggtaaccgactgggaatgaatttacgtccggtactgctgatgcttgagcgacttaaagagtgggtaatgctcgatatctacctggtcggcattggcgttgcttctataaaggtacaggattatgcccatatccaggctggtgtcggcttgttctcttttgtggcgttggtgattttaacgacggtgacgttgagtcatcttaatgtcgaagaactgtgggagcgattttatccgcagcgccccgctacgcgtagggacgagaaacttcgtgtctgtcttgggtgccattttaccggctatccagatcagcgtggtcgctgcccgcgttgccatatcccgctacgcctgcgtcgccgtcatagtctgcaaaaatgctgggcggcgctgttagcgagtatcgttttattgttacctgccaacctgttgcctatttctatcatttatctgaacggaggacggcaggaagatacaattctttccggaattatgagcctggcaagtagcaacattgcggttgcaggaatcgtgtttatcgccagtattctggtaccgtttactaaagtgatcgtcatgttcactttactgttgagcattcattttaaatgccagcaaggtttacgcacacgcattctgttactgcggatggtgacctggattggtcgctggagcatgctcgacctgtttgtcatatctttaaccatgagcctgattaatcgcgatcagatcctcgcttttactatgggaccggctgcgttttatttcggcgcagcggtaattttgactattcttgctgtggaatggctggacagccgcttactttgggatgcacatgagagtggaaacgcccgcttcgacgactgaataaccgcttactttgggatgcacatgagtcaggaaacgcccgctagcacgactgaagcgcagattaaaaataaacgccgtatcagtcctttctggctgctgccgttcatcgcgctaatgattgccagttggctgatttgggacagttatcaggaccggggtaataccgtcaccatcgactttatgagcgcggatggtattgttccaggccgtacgcctgttcgttatcagggcgttgaagtcggaacagtgcaggatatcagcctcagcgacgatcttcgtaagattgaagtcaaggtcagcatcaagtccgatatgaaagatgcgctgcgcgaagagactcagttctggctggtgacgccaaaagcaagcttggcaggtgtctccgggctggacgccctcgtcggtgggaactatatcggcatgatgccgggtaaaggtaaagagcaggatcactttgtcgcactcgatacccaaccgaaatatcggctggacaatggcgatctgatgatccacctgcaagcccccgatctcggtagcctgaacagcggtagtttggtctatttccgcaagatcccggtgggaaaagtctacgactatgccatcaatcccaacaagcaaggcgtggtgattgatgtcctgatcgagcggcgttttaccgatctggtgaaaaaaggtagccgtttctggaacgtttccggcgttgatgccaacgtcagtatcagtggcgcgaaggtgaaactggaaagcctggcggcactggttaacggtgcgattgccttcgatagtccagaagagagcaaacctgccgaggcggaagatacctttggtctgtatgaagatctggcccacagccagcgtggcgtaataataaaactggaactgccgagtggggccggattaaccgccgacagcacgccgttaatgtatcaggggctggaagtcggacagctgactaaactggatttaaatcctggtggtaaagtcacaggggaaatgaccgttgatcccagcgtcgttaccctgcttcgtgaaaatacccgcatcgaattacgcaacccgaaattatcccttagcgatgctaatctcagcgccctgctgaccggcaaaaccttcgagctggtgcccggcgatggcgagccacgcaaagagttcgttgttgtgccaggcgaaaaagcactgctgcatgaacctgatgttctgacgctgaccctgaccgcgccggaaagttacggtattgatgcgggtcagccgctcattcttcacggcgtgcaggtaggccaggttatcgatcgtaaactcaccagcaaaggcgtcacctttaccgtcgccatcgagcctcagcatcgcgaactggtaaaaggcgatagcaaatttgtcgtcaacagccgtgtcgatgtgaaggtggggctggatggcgttgagtttctcggtgccagcgccagtgaatggatcaatggcgggatacgtattctgccgggcgataaaggtgagatgaaagccagctatccactgtatgccaatttggaaaaagcgctggagaacagccttagcgatttacccaccacaaccgtgagtttgagtgcagagacgctgccggatgtgcaggcaggaagcgtagtgctgtaccgtaaatttgaagttggtgaagtgattaccgtgcgtccgcgagctaacgcgtttgatatcgatctgcatattaagccggagtatcgcaaccttctgaccagcaatagcgtgttctgggcagaaggcggggcgaaagttcagctgaatggtagtggtctgaccgtacaggcatccccgctctccagagcattaaagggagccattagcttcgacaacctcagcggtgccagcgccagtcagcgtaaaggcgataagcgtattctgtatgcttccgaaacagcggcccgtgcggttggcgggcagattacgcttcacgctttcgatgccggaaaactggcggtcgggatgccaattcgctatctcggtattgatatcgggcaaatccagacgctggatctgattaccgcacgcaatgaagtacaggcaaaggcggtactttacccggaatatgtccagacctttgctcgcggtggtacgcgcttcagtgtggtcacaccgcaaattagcgcagctggcgttgagcatcttgatactatcctccagccgtatatcaacgtcgaaccaggccggggcaatcctcgccgcgactttgaattacaagaggccaccattactgatagccgttacctggatggcttaagcattattgttgaagcgccggaagccggtagcttaggcatcggtacgcctgtgctgttccgtggtctggaagtcggtacggttacaggaatgacgctggggacattgagtgatcgcgtgatgattgcgatgcgcatcagtaaacgctatcaacacctggtgcgtaacaattccgtcttctggttggcaagcggttacagtctggactttggtctgacgggcggcgtagtgaaaaccggcacctttaaccagtttatccgtggcggcatcgccttcgccacgcctccgggtacgccactggcaccgaaagcccaggaaggcaaacacttcctgttgcaggaaagtgaaccgaaagagtggcgtgaatggggaactgcgcttcccaaataatgcccactgctccggcgtgcctgcgccggagcgtttatgctaaactgcgcgcctgtttttttgccagtggtacatgctcgtggcccaacacaccgtttatttcccggacgcctttctgacacaaatgcgcgaagcgatgcctagcacgctcagttttgatgattttcttgccgcctgtcagcgcccgttgcgccgcagcattcgcgttaatacgctgaaaatctccgttgctgatttcctgcaattaaccgctccttatggctggacgcttacgccaattccgtggtgtgaagaaggtttctggattgaacgcgacaatgaagatgcattgccattgggtagtaccgccgagcatttaagtggcctgttttatattcaggaagccagtagtatgttgcctgttgccgccttgtttgctgacggtaatgcaccacagcgggtgatggatgtcgctgccgcgcctggctccaaaacgacgcaaatttccgcgcggatgaataacgaaggggcaatccttgccaatgagttttccgccagtcgggtaaaagtgttacatgccaatatcagccgctgtggtatcagtaatgttgcgctcacacattttgatggccgcgtgtttggtgcggcagtgccagaaatgttcgatgccattttgctggacgctccctgctctggcgaaggcgtggtgcgtaaagatcccgatgcgctaaaaaactggagtccagaaagcaatcaggaaatcgcagctacacaacgggagcttatcgacagcgcctttcatgcattacgtcctggtggtacgctggtttacagcacctgtaccttaaaccaggaagaaaacgaagccgtttgcctgtggctgaaagagacttaccccgacgcagtagagtttttaccacttggcgatctcttccctggtgcaaacaaagcgctgaccgaagaaggctttttgcatgttttcccacaaatttacgactgcgaaggcttcttcgttgctcgtctgcgtaaaactcaggcgattcccgccttacccgcccccaaatacaaagtcggtaattttccgttcagcccggtgaaagatcgcgaagctggacaaattcgtcaggcggctacaggtgttggcttaaactgggatgaaaacctgcgcctctggcagcgtgacaaagaactgtggttgttcccggtgggcattgaagccctgatcggtaaagtccgattttctcggttggggattaaacttgccgagacgcacaacaaaggttatcgctggcagcatgaagcggttattgctcttgccagtcccgataatatgaatgcattcgagctgacaccgcaggaagcggaggagtggtatcgcgggcgcgatgtttacccgcaagccgcgccagtggcggatgatgtattggttactttccagcatcaaccgattggtttagccaaacggattggtagccgattgaaaaacagctatccgcgtgaactggtgcgcgatgggaaactttttaccggtaacgcctgacagcgcacaaaaaaagcgcactttttgactggcacattcggctgcctcaactaggctgaaaaatggtgcgatcggactggtcgtaccacaatcggcagctaaatggagagcacgaagatgaaaaccagtgtgcgcataggcgcttttgaaatcgacgacggcgaattacacggtgaaagcccaggtgatcgaacgttaaccattccttgtaaatctgaccccgatttatgtatgcaactggatgcctgggatgctgaaaccagtatccctgccctgctaaatggcgaacactctgtcctttaccgtacccgttacgatcaacaatctgatgcctggattatgcgtcttgcctgatccaaaaagaacccgtcggcatggcgggttatttgtcctggttattcccccgttgtaaaatctctcctaaacttaacggtacggcaccacacttcggggatgaaatgttcgcgctggtactttttgtttgctacctggatggcggttgtgaagatattgttgtggatgtctacaacacggaacagcagtgtctttattctatgagcgatcaacggatccgccagggcggttgttttccgattgaggattttatagatggtttctggcgacctgcacaggagtacggtgatttttaattattgcaattgcacaagagtcagttcgcccccaaagacagcaccggtatcaatataatgcaggttgccaatatccacgcgatgtcgcaacggtgtatgaccaaaccagaaatgatcagcacctgtaattccctgccctttttggcgttcacctaatcggctgcggctccacaagacctgatgcaaatcaacgtccttttgccattcataaacatcatctggataatcggcatgagcaataatatgcttgccggtgcgactgtgtacttcaagaataaagggcaaatgctgacatttttccagcgccgttttcgcttgtttctgttgattatctgccagcgcaataaaccagtcgccgccattcatcaaccacaaagacatctgctgggatgccagcgcatccatcgccatctgttcatgattgcctcttaccgcacaaacccaatgttgttccagtaactgcagacaacgtaaactttgcggcccacgatcgataacgtctcccacactgataagtaaatctcgccacggatcaaaacgacaatgccataatttgcggcgcaactgctcaagacaaccgtgtatatcgccagaaagccagatatgtcgccattgatgacccgcaattctctgataaacgggcgcaggctgtttcatcaatattttcctcccgcgctaaagatcacataatcttaacaagaatgttaaaaaacgctggactcagacagtagagtgtgtgttatggttgactataaagtcagcgaaggaaatgcttctggcttttaacagataaaaagagaccgaacacgattcctgtattcggtccagggaaatggctcttgggagagagccgtgcgctaaaagttggcattaatgcaggcttagttgccttgccctttaagaatagatgacgacgccaggttttccagtttgcgtgcaaaatggtcaataaaaagcgtggtggtcatcagctgaaatgttaaaaaccgcccgttctggtgaaagaactgaggcggtttttttattggaaatcaaaaggctattttaggtaattaacagagtttttcagctcgttctataaacggtgccagactcattttttcgccgggattgttaggatcatcaatctgaatcacgctaatgggttgggcattggtcttcccactggcaacttccttttgtgcgatatcgtttaaaggatactgcacgagggtactcggattaataacatacaaagcattacccggtcggcaagtcagcatcacctcttcgcgattaaacgcccatttgtctttacccacttcaaaacgactgacggtaatcacctgcggtgcagccagcgccgctgcagaactggtgagtaacagaaacgccagaatactttttttcatcattttcgtaatccatcaaaaaggttcgagagtcgcaagcaggctgatgatcaccagcactaccgcacctatcgcccattcgagtttagtcatccacacaaaccagggtgccgcacgatcttcatcctgcctcatgcgcggtacaagaacataacgattagccagcgcaatgaccaccataatcatcaccaggatggctttgagcaataagagttggccccagtaagtcgtaagcgtggggggaaatccggtaatcaacaatgcattaagcacgccgcttgccagtacgccgatcaccgcaaaatgcccgcaccaggaaaaacgcatcagcgcctgaatagcctggtgtcgccaacggcctttgatgagttgcatacaccagagcaccggcagtaatcccccaaaccacgccgccgcacaaatcaggtgaatcgcgtgattagtctgatggattttcgctgttaccccttcattcagcgtcgcatgccccactcccgccagcagaataaattgcgcggtagtgagcataaacagcaaacgtggcatattccgcggttgcataagggcgacgatcaacgttacgagggcgagaacaatttgccataaccagatgccaccaaactgcgtttgcaaaacagcctgccaaatgtttgggctaaatacatctgtccatcccgttcccatcaacccgccctgaacggcgagcattgcagtggcactgatcaaactccagacggcagcgtgctgttgtaaacgcagaaaacgcttcgccagcaagcgacgaatcgtcaagggggccagccaggcaccgtacattgcgaagccaaaaaccagcatcaggctggtgaaatggataaatcgcagcgcgatccaggtaaacgccagcatgatttatttcacgctaaaggtgtagtgtcctttcgttttatgcccgtccacgctaacaacatgccagtcaacggtgtaggttccgggtttcaggctatcggccagtggaacaatcagttgcttttggtcctgctcatttcgcttcgccggtaatgttttaatattttcgttttttggccccgtgatttttgcaccactgaatcctgtttcaacaccttcgctgaagtttaaagtgattgcctgcggtgcagctgtcacttgcgcgtttgccgcaggatactgatgcgttaaatgcgcatgtgcccagacggaaggtgtcaccaagctagtggtcaggattgccagcgcgtagcgaagggagcgtgcagtactagccatattatctattcctttttgtaataacttttttacagagcataaccttgtctaatgtctgagtcgaggatcatcaattccggcttgccatcctggctcactcttagtaacttttgcccgcgaatgatgaggagattaagaatgctgaagaatctggctaaactggatcaaacagaaatggataaagtgaatgtcgatttggcggcggccggggtggcatttaaagaacgctacaatatgccggtgatcgctgaagcggttgaacgtgaacagcctgaacatttgcgcagctggtttcgcgagcggcttattgcccaccgtttggctagcgtcaatctgagtcgtttaccttacgagcccaaacttaaataaaacttatacagagttacactttcttacataacgcctgctaaattatgagtattttctaaaccgcactcataatttgcagtcattttgaaaaggaagtcattatgagcttctggaaagttgcagcagcgcaatatgagcctcgtaaaaccagtctcaccgaacaggtagctcatcatctggagtttgtgagggccgccgccaggcaacaatgtcagctgttagtttttccaagcctttctttactggggtgtgattatagccgacgtgcccttcctgccccacccgatctcagtctgttagacccgctttgttatgccgcaacgacctggcgaatgaccatcattgccggccttcccgttgaatataacgatcgctttattcgtggaattgcggtgttcgcaccgtggcgaaaaacgcctgggatctaccatcagagtcatggtgcatgtctgggccgtcgttccagaaccatcacggtggtcgatgaacaaccgcaaggtatggatatggacccgacctgtagtctgtttactacagggcaatgtctgggagaacccgacctgctggcgagcgcccgtcgcttacaattttttagtcatcagtacagcattgccgtgctgatggcaaatgcccgtggtaacagtgcactatgggatgaatatggtcgtctcatcgttcgcgccgatcgtggtagtttattgttagtcggtcagcgtagtagtcagggttggcaaggcgatatcattccattacgctaagctttttcggcctggagcatgccatgttgcgcattatcgatacagaaacctgcggtttgcagggagggatcgttgagattgcctctgttgatgtcattgacggaaaaatcgtcaaccccatgagccacctggtgcgccccgatcgtcctattagtccacaagcgatggcgattcatcgcatcaccgaagccatggtcgccgataaaccgtggattgaagatgtgatcccacactattacggtagtgaatggtatgtcgcgcataacgccagctttgaccgccgcgtactgcctgagatgcccggtgagtggatttgcactatgaaactggcccgtcgtttgtggcctgggatcaagtacagcaatatggcgttatataaaacacgcaagctcaatgtacagacgccgccgggcctgcatcatcaccgcgcgttgtatgactgttatatcaccgccgcgttgcttatcgatattatgaacacctccggctggacggcagaacagatggccgatatcaccggacgtccgagcttgatgacgaccttcacctttggcaaataccgtggcaaagcggtttccgacgttgccgaacgcgatccgggctatctgcgctggttatttaataacctggacagcatgagcccggagctgcgtttaacactgaaacattatctggaaaatacttaatccgcaggcgtagcgggtaatgttccctgcgccagcgcgaccagaaaagcatattccatcgctacgccttcgtagcttttaaagcgaccagatttaccgccatggccactgtccatgtcggtacagagcaataaaagatggtcatcggttttcagctcgcgcaatttagcgacccattttgccggttcccaatattgcacctgagaatcgtgcaaaccggtcgttaccagtaaatgcggataagcctgtgcggtgacgttgtcatacgggctgtagcttttcatgtactcgtaatattgcggatcctgcgggttaccccactcttcaaactcaccagtggtaagaggaatactttcatcaagcatcgttgttacaacatcaacaaacggtacctgggcgataacgccgtggaataattccgggcgttgattaattgcaacgcccatcaacatgccccccgcactcccgcccatcgcataacaaaggctaggagagccatagcccagttttaacaatgcatcgcaggcatcaagataatcattaaacgtatttttcttcttcagaaattttccgtcttcgtaccattgttgccccagctcaccaccgccgcgaacatggacaatggcgtagacaaagccacgatctaacaaactcaagcggctaaaactgaaatcggcatcaatacttgcgccgtaagaaccatagccatacaccagcaacgggttgtgtcctttgcgaaaatgtttgcgatggtagaccaagctaaccggaacttcgacgccatcacgggcgactatccacaggtgttcactgcggtaattcgccgcataaaaaccaggaacttccgtttgttttaatacacgacgctcaccggtatccatatccagttcaaacaaagtgtctggtgtagtcatggaagaataaccataacgcaatcgcgcggtttcaggttctggattgtaggcaatccaggtcacataggccggatcatcaaaggcaataccaatgacttcccgggtcttgcggttaatttggcgcaaactggttaacccgcgctgacgctcttcaaccaccagccagtcggtaaacagcgtaaacccttccagcatgatgttttcgcgtggcggaattaactcttcccactgttgctcatcacgcatacgggtacggtataagccaaagtttttgccgtggcggttggaacgcagataaaaacgatgctggtagtgatcaaggctgtattcgtgatctttgcggcgcggcagaaaaacaaacggctcggcatcggccatttccgcgtccagcaggcgaacttcactggtggtggcgctggccaaatgaatgactacatagtgcttgctggtcgttttatgcaggctgacgtaataggtatcgtctttttcttcgtagatcagtttatcttggcttgctggcgtaccgatggcgtgacgccagacctgataaggcagcagcgtcaccggatgcttgcgaacatagtagaaaatccaggagtcatttgcccagacaaagctgggttcaacgttatccagcagttccgggtaccagttaccagtttccagattacgaaaacgaatgccgtactggcgtcgggaaagaaaatcttctgccagcgccataatggtgttatcgggcgtaatcgccattccgcccatgctataaaactcactatgagctgcgcgcttattggcatcgagcaatgtttcccactcatcccactcttcactgaatgcgctttgacgctggtagatagcatattcacagcctggttcataaatatgccgatagcggtagccatttttgatgtagggcgcagaaacttctcgttgcggaatgcggtcgatgatttcctttaagatgcgatcctgcaaggcttgttgactggccatcacccgatgaccgtaactattttcttgttgcaggtagtccaggacttctggctgagaacgcgtatcgtcccgcagccagtagtaattatcgatgcgcgtatcgccatgaagcgtcatggcgtggggaatgcgggcggcttttggtagcatgttattgttctttctggttgaaacatcttataagggtggcaaaactcaccggggatgcaagcgaaacaggggagtcattgcttagatgatgacaggtaatggcgcggatatcgaatgttatgcagacagagaaaatcagcctgttcaaatggctgtgcgattctggatagcccgaaatagtcaacttcaggctatccagagagcggaattattccgccaaagtgcgtttttgctgttcgagatcgcgttcaatgccgtcacgaacatcctgggggattttcagcgcgtcacccagtgcattcaggtaactgcgttccataaaatggtcaatatcaatagccgcgcaactcaggaaatagatttccagcgcctcttcttcattgcggaccccggtagccaggcgttgtggatccagcggttgttcgattgcctgctcaatgagtacacgcccctgctcttccacgccggctccacgcaattgctggtcgattgccgcacgttctttggcatcaatatgaccatcacttttagcggcaaagaccagcgcaaggatcaaacgtgctgtacgctcatccagcggcgtactttgcgcgccaaactgcggttcgtcctgatgcgccgcgcgaattttatctttgtatttattccacagcaccgtacccgctaccgctccgccgccaaccagtaacgcgttggtgccatatttcgtaagaagtttacgtgcacttttatttgcgaccagcagcccagccagtccgcctaatgcgcctggcactaacagtttgaccaatccctgatccgcagagctggaggtagaagaactgctttgcccaagcagggattgcagttgatttaaccagttagccatatttgctcctcaataaccatttttagtgcctgtagcatagcggatgaggatgtcagaaaatgtatatcgagacaaaagatgcgcaaataagcggggcggtaggccgttattcaaagaaattcgcgccaggtaaggtatttactgtatatcaggtgataagggtattttaggtgaaagtagtttgtcgttttgagtggcattgtttgatgctgattgcccgatgcgacgctgttgcgtcttctcaggcctacgattgtggtgcgttctggggcggacaaggcactcgcgccgcatccgccaacagtcaatcgaattatcagaagccattaacgccgctgatattccgccattcccgctttgcagtccacgctgacctggtaatgaatatcggcacttttaccacgcacggttagcggtacactccatttatcatctttaccctgaatgtcctgcaaactgacccaagccacgggatcggcctgaccgacaattttttgatcatctgcccaacgcgccacgcgattttgttgataatcacgttttacgctcgcggcaattccggcagcatccagatcttcacactttgggaaagtgacgctcttgctggtttcattattggcagcgaaaacacttgcgcaggcagaaaccaacaacagccctaaaaacgcccctctttttttcatgtttttctccatagcacaatgattcaggagaaagcatggtacaaattgtcaggagcgcaagttgcttcaggccgcgtgactggcatcttcctcttcggattcagcaccgacgacctgtggggacggtaatttgccggttttcagaatggtgctcagcacatctttttgttctgccagccataggctaagggcttcacgttgctcgtcttccatttgcactggagaatttgtcagccaggtgtcaagcagatccgccgtatcaagcattttgtcataagcatcggcttcctttttgctggtaaagctcattttctcttcgccctcacgaatgactacgtatttaacttcaaccgccatttgcagcctctcataataactgtgattttatacagtatatttcttttcggttgagaaatcaacatcagcaataaagacacacgcaaacgttttcgtttatactgcgcgcggaattaatcaggggatattcgttatgacgttattaggcactgcgctgcgtccggcagcaactcgcgtgatgttattaggctccggtgaactgggtaaagaagtggcaatcgagtgtcagcgtctcggcgtagaggtgattgccgtcgatcgctatgccgacgcaccagccatgcatgtcgcgcatcgctcccatgtcattaatatgcttgatggtgatgcattacgccgtgtggttgaactggaaaaaccacattatatcgtgccggagatcgaagctattgccaccgatatgctgatccaacttgaagaggaaggactgaatgttgtcccctgcgctcgcgcaacgaaattaacgatgaatcgcgagggtatccgtcgcctggcggcagaagagctgcagctgcccacttccacttatcgttttgccgatagcgaaagccttttccgcgaggcggttgctgacattggctatccctgcattgtaaaaccggtgatgagctcttccggcaaggggcagacgtttattcgttctgcagagcaacttgctcaggcatggaagtacgctcagcaaggcggtcgcgccggagcgggccgcgtaattgttgaaggcgtcgttaagtttgacttcgaaattaccctgctaaccgtcagcgcggtggatggcgtccatttctgtgcaccagtaggtcatcgccaggaagatggcgactaccgtgaatcctggcaaccacagcaaatgagcccgcttgcccttgaacgtgcgcaggagattgcccgtaaagtggtgctggcactgggcggttatgggttgtttggtgtcgagctatttgtctgtggtgatgaggtgattttcagtgaggtctcccctcgtccacatgataccgggatggtgacgttaatttctcaagatctcagtgagtttgccctgcatgtacgtgccttcctcggacttccggttggcgggatccgtcagtatggtcctgcagcttctgccgttattctgccacaactgaccagtcagaatgtcacgtttgataatgtgcagaatgccgtaggcgcagatttgcagattcgtttatttggtaagccggaaattgatggcagccgtcgtctgggggtggcactggctactgcagagagtgttgttgacgccattgaacgcgcgaagcacgccgccggacaggtaaaagtacagggttaaacccggcaaaaaaacgctacaaaaatgcccgatcctcgatcgggcattttgacttttacagcttagcgccttctacagcttcacgcgccagcttagtaatgcggtcgtaatcgcccgcttccagcgcatctgccggaaccagccaggaaccaccgatgcacagcacgcttttcagcgccaggtagtcacggtagttagccggagaaataccacccgtcgggcagaaacggacctgggagaacggacccgcgatcgcctgcagggctttcacgccgccgttagcttcagccgggaagaatttgaactctttcaaaccgtagtccatacccagcatcagttcggaaacagtgctgatccccggaatcagaggaatagtcccttcggtagcagctttcagcagcggctcggtcagacccgggctaattgcgaactgtgcacccgcttcagtgacttctgccagctgctgtggattcagcaccgtaccggcacccacaatcgcttcaggcacttctttggcgatagcacggatagcgtcaactgcacactcggtacgcagagtcacttccagaacgcgcaccccaccagcaaccaacgcttttgccatcggcaccgcgtgttccagtttttttaccacgataaccggtacaaccgggccggtggtcaggatactttctgcacttgttttccagtttttcatcagagttttctctcgcctgattacaaatttgtcgtcttaaaaagtgatacaggttgcgccctgttcggcaccggacagtttttcacgcaaggcgctgaataattcacgtcctgttcccacgcgactcgcgctcaggtcaggaatgtgcggttcgcgagcagccagttccgcttcgtctaccagcagcgtcagttcgcctgtctgtccattcacacgaatgatgtccccgtcgcgcacttttgccagcagcccgccatcgtaggcttctggtgttacgtggatagcactcggcactttaccactagcgccggagagtcgtccatcggtaactaacgcaattttgaaacaccggtccaataatacaccaagtggcggcatgagtttatgtaattctggcattccgttcgcttttggcccctgatgacggacaacaacgacacaatcgcggtccagcaaacccgcttcaaaggccggcataacgtcatgctggctttcaaaaacaaccgctggcgcttcaatcacctggttctcaaccggcacggcagaggttttcataaccgcacggcccaggttaccgcttaacacttttgtcccaccatgatgagagaaaggttgttcgaaggaagcgatcacattgctgtcgagacttttttccgccccttcccgccagtccagttcaccattattcagccatggttcaagggtataacgagacagaccaaaacctgccaccgtattgacatcttcatgcagcaggcctgctttgagcagttcacgcaccagaaccggtacgccacctgccgcctggaagtggttaatatcggccggaccgttcgggtagagacgtgccatcagcggtacaacatcagaaaggtcagagaagtcatcccagttaatctgaataccggccgcgcgcgccatcgccaccaggtgcatggtgtggttagtggaaccaccggtcgccagcagtgcaacgataccgttcaccaccactttctcatcgatcatcttaccgatcggcatccattcattaccattaccggtcatgcgtgtaacctgacgcgcagctgcggcggtcaaagcatcgcgcagcggagaatccggatgaacaaaagaagagcctggcaactgcatccccataaactccaccaccatctggttggtgttggcagtaccgtagaaagtacatgttcccggcgcatggtaagacgcggcttcactctccagtaaggccatgcggtccactttaccttcggcataaagctggcgaatacgcactttttctttatttggcaaaccgcttgccatcggtccagacggcacaaacaccgcaggcaaatgaccaaagctcagggctgccatcgtcagacccgggacaatcttgtcgcacacaccgaggaacagagcaccatcaaacatgttatgggacagccccaccgccgcagacatcgctatcacttcgcggcttagcaggctcaattccattccatcctgcccctgggtgacaccatcacacatcgccggaacaccgcccgcaacctgaccaaccgcattcgcttcatgcagggctttacgaatgatttctggatagtgttcataaggctggtgcgcggagagcatgtcgttataggaggtgatgatggcgatattgttacgcaacatgcttttcaaagaggctttgtcttctggctggcaggcagcgaaaccgtgtgccaggttaccgcatgccaactggctacgatgaacggtgctagttttcgcttgttctatccgggcgagataagcagagcgagtctcgcggctacgttcaatgattcgatttgttacgcgtaacaattgtggattcataaaggctcctgaaattgagttgtcagagcaggatgattcacaacgcgtttcattcagaggatttatgactgaaacgcctgtaaccggagctcatagggcaaaaacgtttcagtcagtgtaataaaaaaagcctcgtgggtgaatccgcacgaggcctgaaagtgtaaaaattgttctacaatctgcgcaagatcatgttaccggtaaaataaccataaaggataagcgcagatattactcaaactcattccaggaacgaccatcacgggtaatcatcgccacgctggcaacgggtccccaggttccggcctgatacggtttcggcgcatcattgtccatcgcccacgcctcagtaatggagtctacccatttccaggcttcttccacttcgtcgcgacgtacaaacagtgcctgaataccacgcatggtttccagcagcaaacgttcataggcatccgccagatgcgtctgattaaaggtttcactatagctcagatccagcttggtgatttgcaggttatgtttgtggtcaaggccaggaactttattcagtacctggatatccacgccttcatcaggttgcagacggatagtcagtttattctgcggcagatcctgccagctttctttaaacagattcagttcaggtgttttgaaatagaccacgacttcagaacatttggtcggcagacgtttaccagtacgcaggtagaatggcacaccggcccagcgccagttatcaatgtcgacgcggatcgccacgaaagtttctgtattgctgctcttgttcgcgccctcttcttccagatatcccggcacttttttgccctgggcgaagcccgcagtatattgcccgcgtacggttttttcgcgtacgttggagcggtcgatgcggcgcagagacttcagtactttcactttttcatcgcggatgctgtctgcgctcaggtcagacggcggagacatcgcaatcatgcaaagaatttgcagcaggtggttctggatcatgtcgcgcatctgaccggctttatcaaaatagccccagcgcccttcgatccccacttcttctgccacggtaatctcaacatgatcaatggtgcgattgtcccagttattcacaaacagggagttagcaaaacgcagcgccaacaggttcagcaccgtttctttaccaagatagtggtcgatacggtaaacctggcactcctcgaagtattcgccaacctgatcattgatttcctggctggtcgccaggctcgtccccagcggtttctccatgactacgcgtgccggtttagcattcagttttgcctcgccaagccctttgcaaattgcgccaaaagtgctgggcggcatggcaaagtagttaatggtgatacgatttttttgatccagcatcgcgccgagacggctgaatgcagcagtgtcattgacatcgagattacaaaaatccagacgtgcactcagggtgtcccataaaccttcatcaatggtttctttcatgaaagtttcgagcgcctcgcggacaactttggtatatgccgctttatcccagtcagcacgccctacgccgataatccgggtgtccgggttgagctgaccggctttttccagttgatacagggaaggcagcaatttacgacgcgcaaggtcgcctttcgcgccgaaaatgaccaggtcacaggcctgggctgtttgcgttaccgccatgtcattctccttaagttaactaacccggtacttaagccagggtatacttgtaattttcttacggtgcactgtactgcttttacgagcttgcgaaaactgtaaacgcttatccacccgtgcgattacgggaaaagcgcgcaaagtgcggcaaaactgataaaaaaatcatcgttttccattgggtaaaaatctgacactgatcatgttatgaaaaaaaataacaacttttttatctgcttttgtcattaacacggcacacaggcgtaatatctgacaaaactgcatttcgatttctttcagtgcggaaatcgtcattacccgtgagtctctttacatcatgaatatgctggaaaaaatccagtctcagctggaacatttgagcaaaagtgagcgcaaagttgccgaggtcattctggctagccccgataacgcgatccatagcagtattgctgctatggcactggaagccaatgttagcgaaccgacggtgaatcgtttctgtcgcagcatggacacgcgcggttttcctgattttaaacttcatctggcacagagtctggcgaatggcactccctatgttaatcgcaatgtcaatgaagatgacagcgttgaaagttacacagggaaaatatttgagtccgcaatggcaacgcttgatcatgtccgtcatagtctggataaatctgccatcaaccgcgccgtcgacttgctcactcaggcaaaaaaaatcgcctttttcggattaggctctagtgccgccgttgcccacgatgcgatgaataagttctttcgttttaatgttccggtggtgtactccgatgatatcgtgctgcaacgcatgagttgtatgaattgtagcgacggagacgtggtggtgctgatttctcacactggaagaacaaaaaatctggtcgagctggcgcagctggcacgcgaaaacgacgccatggtgattgccctcacctctgcgggtaccccgctcgcccgggaagcaacgctggcaattaccctcgacgtaccggaagatactgacatttatatgcccatggtttctcgacttgcacagctgaccgtgatagatgtgctggcgacaggatttactttgcgacgcggtgcaaaattcagagataacttgaagcgggtcaaagaagcgctgaaggaaagccgttttgataagcagttacttaatttaagtgacgatcgctaaaaacgactgtcactgtcctaatcttatacgacatccgaatgagattaatttatcgccatcgcggcgttatttcattcggatttcatgttcaagcaacacctggttgtttcagtcaacggagtattacatgtccagaaggcttcgcagaacaaaaatcgttaccacgttaggcccagcaacagatcgcgataataatcttgaaaaagttatcgcggcgggtgccaacgttgtacgtatgaacttttctcacggcagccctgaagatcacaaaatgcgcgcggataaagttcgtgagattgccgcaaaactggggcgtcatgtggctattctgggtgacctccaggggcccaaaatccgtgtatccacctttaaagaaggcaaagttttcctcaatattggggataaattcctgctcgacgccaacctgggtaaaggtgaaggcgacaaagaaaaagtcggtatcgactacaaaggcctgcctgctgacgtcgtgcctggtgacatcctgctgctggacgatggtcgcgtccagttaaaagtactggaagttcagggcatgaaagtgttcaccgaagtcaccgtcggtggtcccctctccaacaataaaggtatcaacaaacttggcggcggtttgagcgctgaagcgctgaccgaaaaagacaaagcagacattaagactgcggcgttgattggcgtagattacctggctgtctccttcccacgctgtggcgaagatctgaactatgcccgtcgcctggcacgcgatgcaggatgtgatgcgaaaattgttgccaaggttgaacgtgcggaagccgtttgcagccaggatgcaatggatgacatcatcctcgcctctgacgtggtaatggttgcacgtggcgacctcggtgtggaaattggcgacccggaactggtcggcattcagaaagcgttgatccgtcgtgcgcgtcagctaaaccgagcggtaatcacggcgacccagatgatggagagtatgattactaacccgatgccgacgcgtgcagaagtcatggacgtagcaaacgccgttctggatggtactgacgctgtgatgctgtctgcagaaactgccgctgggcagtatccgagtgaaaccgttgcagccatggcgcgcgtttgcctgggtgcggaaaaaatcccgagcatcaacgtttctaaacaccgtctggacgttcagttcgacaatgtggaagaagctattgccatgagtgcaatgtacgcagctaaccacctgaaaggcgttacggcgatcatcaccatgaccgaaagcggtcgtaccgcgctgatgacctcccgtatcagctctggtctgccaattttcgccatgagccgccatgaacgtacgctgaacctgactgctctctatcgtggcgttacgccggtgcactttgatagcgctaatgacggcgtagcagctgccagcgaagcggttaatctgctgcgcgataaaggttacttgatgtctggtgacctggtgattgtcacccagggcgacgtgatgagtaccgtgggttctactaataccacgcgtattttaacggtagagtaagtacgttgccggatgcggcgaaaacgccacatccggcctacagttcaatgatagttcaacagatttcgaatattctgaagcaaacttgaacttatcatcaggcgaaggcctctcctcgcgagaggcttttttatttgatgggataaagatctttgcgcttatacggctggatttcgcccggtttgcgagttttcagcaattttagtatccaggtgtattgttctggtcgcggaccaacaaaaatctcgacttcttcattcatccgccgcgcaatcgtatgatcatccgcctctaacagatcatccatcggtgggcgcacctgaatcgtcagacgatgcgtcttgccatcataaatcggaaacagcggtacaacgcgcgcacggcacactttcatcaaacgaccaatcgcgggcaacgtcgctttataggtggcaaagaaatccacaaattcgctgtgctctgggccatgatcctgatcgggtaaataatatccccagtacccctgacgtacgctctggatgaatggtttaataccgtcatttctcgcatgcagacgaccgccaaagcgacgacgcaccgtgttccagacataatcaaaaaccgggttgccctgattatggaacatcgctgccattttctgcccttggctggccatcagcatggcaggaatatcgacggcccaaccgtgcggcaccagaaagataactttctcgttattacgccgcatctcttcgatgatctccagcccttgccagtcaacgcgcggctgaattttctccggcccgcgtattgccaactcagccatcattgccatcgcttgcggcgcggtggcaaacatctcatcaacaatcgcttcgcgttcagcttcactacgttctggaaagcagaggctcagattgattaacgcacgacggcgactgctttttcccagtcgtccggcaaaacgtcccagccgtgccagaatgggatcacggaactttggcggcgttaaagcgatacccgccatcgctgctacgcccagccatgctccccagtagcgcgggtggcgaaaggatttatcaaactcaggaatgtattcgctattattttttttcgtttccatgcttttccagtttcggataaggcaaaaatcaatctggtgatagtgtagcggcgcaacttgccccgcaccaaataaaaaaagccggtactgactgcgtaccggctgcgaatggatgttaattaatcaaaccgtagctgcggcacaatctctttggcctgcgccaggaattcgcgacgatcggagccggtcagcccttcggtacgcggcagttttgccgtcagcgggtttacggcctgctggtttatccatacttcatagtgcagatgcggcccggtactacgtccggtattaccggaaagcgcgatacggtcgccacgtttcaccttctgtcccggtttcaccagaatcttgcgcaagtgcatataacgcgtggtgtagctgcgaccatgacgaatagccacataataacctgctgcgccactgcgtttggcaaccaccacttcaccgtcacccacactaagcactggcgtaccctgcggcatggcgaaatcaacacctctgtgtggtgcaacgcgaccggtcaccggattagtacgacgcgggttaaaattagagctgatacggaactgtttcgccgtcgggaatcgcaagaatcctttcgccagaccagtaccgttacgatcgtagaatttgccatcttcagcgcggatagcgtaataatctttaccttcactacgcaaacgtacgcccagcagctggctttgctcacgtttaccatcaagcatttctcgagacattaacaccgcaaattcatcgccttttttcagtttgcggaaatccatttgccactgcatggctttaatcactgcgctcacttcggcgctggttaaaccggcgtttctggcgctggcaacaaagcttcccccgacggtacctttcagcagattgttaacccactctccttgctgcatttcgctggtcattttaaaaccgttagcggcagtacggtcataggttcgggtttcacgacgagacacttcccaggtgaggcgctgcagttcgccgtccgcggttaatgtccaggagagttgttgaccgattttcaggttacgcaattctttgtcggccgcagccagttgggtgatatcacccatatcaataccatactgattgagaatgctgcttagcgtatcgccagtggaaacaacatattcatgcacgcccgcttcaccggcgattttgtcatccagttcgtcctggggaatggcttcatcttcttgtgcagcttgatcaatcggctcactggcttcaggtaagaggctacgaatttcgttctgttccagctcaatggttttgacaattggcgtggcatcacggtgataaacataaggccgccagacagcgacggccagagtaagaacggtgaggctccccaacataacgcggtgtggtcgcggtaaattattaaacgccagggcgacagagcgggctatctgttgcacgtaatcacttcctcattaatctcctttcaggcagctcgcatactggttggctaattgactcaggaattcactatagcttgttttacccagtttgatattcgtccccaggggatccaacgttcccatacgaacggatgtccctcgtgcgacgctctcaacgaccgctggcctgaactgtggctcagcaaaaacgcaggttgctttttgctcaaccaactgtgttcttatttcatgtaaacgctgcgcgccaggttgaatctcagggttaacggtaaaatgaccaagcggtgtcagtccaaactgtttttcgaaatagccgtaagcatcgtgaaaaacgaaataacctttccccttgagcggcgcgagctcgttaccaacctgcgtttcggtactggctaattgtgcctcaaaatccttcaggttggcgtcaagtttggctcgactttgcggcataagttccactaattttccatggattgcaaccgctgtagcccgcgctatctctggggaaagccaaagatgcatgttgaaatcgccgtgatggtgatcttcgtcacttttttccgcgtggtcgtgatcatcatcatcgccgtgaatacttttcatcagtagcggtttcacatcttcaagctgcgcaatcgttacctgcttcgctcctggtaatttgcttaccggtttttgcataaacgcttccatctccgggccaacccaaacgactaagtccgcgttctgtaagcgttttacatcgcttgggcgcagactataatcatgttcactagcgccgtcaggaagtaaaacctctgtttctgttaccccatcagcaatggcagaagcgatgaacccaacgggtttaaggctagcgacaacggcggcatctgcggcctgtgttgcacctccccagagagcggcggataatgctgcgaaaagaagcgtttttttatgtaacataatgcgaccaataatcgtaatgaatatgagaagtgtgatattataacatttcatgactactgcaagactaaaattaacatgacaagtctggtttccctggaaaatgtcagcgtttcttttggccaacgccgcgtcctctctgatgtgagcctggaacttaaacctggaaaaattttgactttacttgggccaaatggcgcaggtaagagcacactggtacgggtagtgctcgggctggtaacacccgatgaaggggttatcaagcgcaacggaaaactgcgcatcggctatgtaccgcagaagctgtatctcgacaccacgttgccactgaccgtaaaccgttttttacgcttacgccctggtacacataaagaagatattttgcctgcactgaaacgtgtccaggccgggcacctgattaacgcaccgatgcaaaagctctctggtggcgaaacgcagcgtgtactattagcgcgagcattgttaaatcgcccgcaattattagtgctggatgaacccactcaaggcgtggatgtaaatggccaggtggcgttatatgaccttattgaccaactgcgtcgtgaactggattgtggcgttttaatggtttctcacgatctgcatctggtgatggcaaaaaccgatgaagtgctgtgcctgaatcaccacatttgttgttccggcacaccggaagttgtttccctgcatccggagtttattagtatgtttggtcctcgtggtgctgaacaactgggtatctatcgccatcatcataaccatcgtcacgatttacagggacgaattgttttgcgtcggggaaatgatcgcagttgatttaacgtcggggaaatgatcgctcatgattgaattattatttcccggttggttagccgggatcatgctcgcctgtgccgcgggtccgctgggtagctttgtagtctggcgtcgtatgtcttatttcggtgatacgctggctcatgccagtttacttggcgtcgcgtttggtttgttgctggacgtgaatccattctatgcggtgattgccgttacgctgctgctggcgggcggtctggtatggctggagaagcgtccacagctggcgatcgacacgttattagggattatggcgcacagtgccctgagcctgggcctggtggtcgtgagtctgatgtctaatattcgtgttgatttgatggcttacctgttcggtgatttgctggcagtgacgccagaagatctcatctctattgcgattggcgtggtcatcgtggtggctattttgttctggcaatggcgcaatttgctgagtatgacgataagcccggatctggcgtttgttgatggtgtgaaattacagcgagtgaaattgttgttgatgctggtgacggcattgacgattggtgtagcgatgaaatttgtcggtgcgttgattattactagcttgctgattattcctgctgctactgcgcgtcgctttgcccgcacgccggaacagatggctggtgtcgctgttttggtggggatggtggcagtgactggcggtttaaccttttccgcggtttacgatacgccggcgggtccgagcgtggtgctatgtgcggcactgttatttattctcagtatgatgaaaaagcaggccagctaatctatcgctgaacacatttgtcggatgcggcgcgagcgccttatccgacctacggttcggtatctctggtagtcctggtaagacgcgaacagcgtcgcatcaggcatattgccagtgccggatgcggcgcgagcgaccaatccgacttacggcatttctggcggcgttatgccaaagtgattccacgcccgcgtcgtcgccatacgcccacgcggtgtacgctgcaaaaagccttgctgaatcaaataaggttccagcacatcctcaatggtttcacgttcttcgccaatggctgccgccaggttatccagacctacaggtccaccaaagaacttatcgattaccgccagcaacaatttgcggtccatataatcgaaaccttcagcatcgacattcaacatatccagcgcctgagcagcgatatctgcgctgatggtgccatcgtgcttcacttcggcgaaatcacgcactcgacgcagcagacggttggcaatgcgcggcgtaccgcgagcgcgacgagcaacttccagcgcgccgtcatcactcatctcaagccccataaagcgtgcgctgcgactgacgatatattgcagatccggcacctgataaaactccagacgttgcacaataccaaaacggtcgcgcaacggacttgtcaggctacctgcgcgcgtggttgcaccaatcagggtaaacggcggcaaatcaattttaatggagcgtgccgccggaccttcaccaatcatgatatccagttggtagtcttccattgccgggtacagcacttcttcaacaactgggcttagacggtggatctcatcaataaacagcacgtcatgcggttcaaggttagtgagcatcgcagccaaatcgcccgccttttccagcaccggaccagaagtcgtgcgtaaattaacgcccatttcattggcgacaatgttggcaagcgtagttttacccaaccccggaggaccaaaaatcaacaaatgatcgagggcatcgccgcgcagtttcgctgctttgatgaaaatctccatctgactacgaacctgcggctgaccaacatactcttccagtaatttggggcgaatggcgcgatctgctacatcttccggcaaagtggtaccggcagaaatcagacggtctgcttcaatcatcctttacctcataacgcggcgcgtagggcttcgcgaattaaagtttcactgctggcgtcagggcgagcgattttgctcaccatgcggcttgcttcttgtggtttatagcccagcgccaccagcgcggcaaccgcttcttgttcagcatcgtcggtcgccgggctggcaggagacgtgagtaccaggtcggcggctggcgtaaagagatcgccatgcaaacctttaaatcggtctttcatttcaacaatcaagcgttcggcggtttttttgccaatacccggcagtttcaccagtgcccccacttcttcacgctcaacggcattaacgaactgctgcgcactcattccggagaggatcgccagcgccaacttcgggccgacgccgttggttttgatcaactctttgaacaatgtgcgctcttgtttattgttaaaaccgtacagcagttgcgcgtcttcacgcaccacaaagtgggtgaaaacgatcgcttcctgacccgcttcagggagttcataaaaacaggtcatcggcatatgcacttcatagcctacgccgcccacttcaattaacaccagcgggggttgtttttcaatgatgatgcctctgagtctgcctatcacatgacgctcctgcgtaatgaatcaaagataatgctgtatgataaaaaaatgctggatagatatccagcgaaggatgaagaaaacttgcgaggtgtctcgatgaactgaaaaatggcacagtataatttattctacaggttatattggaagcaaatattttaatattacatattcagtgaagaaatgcgtaataaaaatatacattgcgcctcctgaaaaaataaattttttatgctattacgtatatttgtatctatttcaatggaatgacaacgtgaatattaattaccctgctgaatatgaaattggagatatcgtctttacatgtataggtgctgccttatttggtcaaataagtgctgcaagtaattgctggagtaatcacgtcgggatcattatcggtcataacggtgaagacttcctggttgcagaaagccgggttccccttagtaccatcaccacgctatctcgttttattaaacgtagctctaatcaacgctatgctataaagcgattagacgctgggctgacagaacgacaaaaacaacgaattgttgaacaggttccctcccggctacgcaaactttaccacaccggttttaaatacgaatctagccgccagttctgtagtaaatttgtttttgatatttataaagaagcgctatgtattccggtgggtgaaatagagacgtttggagaattgttaaatagcaatccgaatgcaaaactcactttctggaaattctggttcctgggttctattccgtgggagcgtaaaaccgtcacgccagccagtttgtggcatcatccgggtttggtgttgattcatgcggagggagtggaaacgcctcagccggaactgaccgaggcggtataacttaacgcagtcgccctctcgccaggttcagccggctttcgctcatctgcatcgcattctgactaacgtggcagtgggtgatagcaatcgccagcgcatcggcggcatccgcctgtggattagcgggcagtttcagcaaggtgcggaccatatgctgcacctggcttttttcggcactgccaatacctaccaccgtttgctttacctgacgtgccgcgtattcaaatactggcaactcctgattcaccgccgccacaatcgccacgccgcgcgcctggcccagtttcagggcactgtcagcgttctttgccataaagacttgttcaatggcgaaataatcaggctggaactgggtgatgatttccgtcacgcccgcatagatgagtttcagacgagacggtaaatcatccactttggtgcggatgcatccgctacccaggtaggacagttgcctacctacctggcggatgacgccgtagccggtcacgcggctacccggatcaatgccgagaataatagccatcacgcgtctccgttttgctgtttagcaggcctcatcagagagtcgctgcgacctcatcagagatttcaccgttatggtaaacttcctgcacgtcgtcgcaatcttccagcatatcgatcagacgcatcagtttcggtgcggtttctgcatccatatcagctttggtagacgggatcatggaaacttccgcgctgtctgctttcagacctgccgcttccagagcgtcgcgcactttacccatttcttcccatgcagtgtagacatcaatcgcgccgtcatcataggtcacaacgtcttcagcacctgcttccagtgctgcttccatgatggtgtcttcatcgcctttctcgaaggagatcacgccttttttgctgaacagataggcaacggaaccatcagtaccgaggttaccgccacatttgctaaatgcatgacgcacttcagcaacggtacggttgcggttgtcagacagacattcaatcatgattgccgtgccgccaggaccgtaaccttcgtagatgatggtttccatgtttgcatcatcatcaccgcccacaccacgtgcaattgcgcggttcagtgtgtcacgggtcatgttgttagacagtgctttatccaccgccgcacgcagacgcgggttagcgtccggatcgccaccgcccagcttagccgcggttaccagctcacgaatgattttagtgaagattttaccgcgcttagcatcctgcgcagctttacgatgtctggtgttggcccatttactatgacctgccataaaaatatctccagatagccctgcctgttcaggcagcgttaattacaaactgttcaatcgcctgccggttgctccaggacttagtgagcgccgccgcagcaggcgcatcaagccacttgtaagccagatgttcagtgaaaacgatctgccgctcgtgcggaagcgcaagacagaaccaactttccgtattacgcgtcacgcccggcgcatagcgatgacgtaaatgactaaaaatttcaaactctaccgtgcgctgacagtcaattaaggtcagttgttcagcgacaacatcaatggtgacctcttcctttacttcgcgcatggcagcttgcggcgcggtttcaccctcttccacgctgccggttacgctctgccagaaatcgggatcgtcacgccgctgcaacatcagcacccgtttcgtatcttgtgcgtagatgaccactaagatgctaacgggacgcttatacactttatccttcacgctgcctcttcgttgactgccttcgctcatcccattcacatagttatctatgctcatgggagttcactcagttgccgcctcgatgcaacgcgaatgatttcgtgtatttgagtcatatcagttattctcagccttcttcacaacctgaatgctcagctcagccagtgcagtcgggttagcaaagctcggtgcttcagtcatcagacacgctgccgccgtggttttcgggaaggcgataacgtcacggatattgtcggtgccggtcagcagcatggtcagacggtcaagaccgaatgccagacctgcgtgcggcggagtaccgtatttcagagcgtcgagcaggaagccgaatttctcgcgctgttcctcttcgttgatacccagaataccaaacaccgtctgctgcatatcaccattatggatacgtacactaccaccgcccacttcgtaaccattgatgaccatatcgtaagcgttcgccaccgcattttccggtgcagctttcagttctgcagccgtcatatctttcggactggtgaacggatggtgcattgccgtcaggccgccttcaccgtcgtcttcaaacatcgggaagtcgataacccacagcggtgcccatttgctttcgtcggtcagaccaaggtctttacccactttcaggcgcagtgcacccatcgcgtcggcaacaattttcttgttgtcggcaccgaagaaaatcatatcgccatcttgcgcggcagtacgatccaggatgtcttcgatgatttctgcattaaggaacttcgctaccgggctgttgataccttccagacctttcgcgcgttcgttaactttgatgtaagccagacctttcgcgccgtagattttaacgaagttaccgtattcgtcgatctgcttacgggtcaggcttgcgccgcccggaacgcgcagagccgctacgcgacctttcggatcgttcgccggacctgcaaatacagcaaactcaacagatttcagcagatcagcaacgtcagtcagttccatcgggttacgcagatccggtttatcagaaccataacggcgttctgcttccgcaaaggtcattaccgggaaatcgcccagatccacacccttcacttccagccacagatgacgcaccagcgcttccatcacttcacgcacttgcggcgcggtcatgaaagaagtttccacatcgatctgagtaaattcaggctgacggtcagcacgcaggtcttcgtcacggaagcatttaacgatctgatagtaacggtcaaaaccggacatcatcagcagctgtttgaacaactgcggggattgcggcagtgcgtagaatttacctttgtgcacacgagaaggcaccaggtagtcacgcgcgccttccggcgtggctttggtcagcatcggagtttcgatgtcgaggaagccgtggtcatccataaaacggcgcaccaggctggtgattttagcgcgggttttcaggcgctgagccatttccggacgacgcaggtcgaggtagcggtatttcagacgcgcttcttcggtgttgacgtggttagagtcaagcggcagaacatctgcgcggttgatgatagtcaggctggacgccagcacttcgatttcgccggtcgccatatcgcggttaatatttttttcgtcacgcgcacgtacggtgcccgtgacctgaatgcagaactcattacgcagttcagaggccagctttaacgcgtccgcacgatccggatcgaaaaatacctgcacgataccttcgcggtcgcgcatatcgatgaagatcaggctaccaagatcacgacgacggttgacccaaccacacagagtcacctgctgccccacgtgggacaaacggagctgtccacaatattctgtacgcatgagatatcccttaacttagctgccggcggatgccccctgctgcgcaggtgaccaagtcgcagcgttagctgtatgtcacaactgaatgaaaaaaggcggctattatactggaaattctgccgcaccgtaagagcctggcccgcgctggaacgcctcgttaccactttatatcgggcctgaaatcagactctacgccagtttgctataaaggtgttgcccgaactcataaaaattaacaaaatttgtcgttccgccatcggctaatcgcattaaggtgtgaggcacgattttgttttttcaggagtcattatgcttgaacttaatgctaaaaccactgcgctggtggtgatcgatttacaagaaggcatcttaccttttgccggtggtccacatactgccgatgaggtagttaatcgcgccgggaagctggcggcgaaatttcgcgccagcggtcagcccgtgtttctggtgcgcgttggctggtctgccgattacgctgaagcattaaaacagccggtcgatgcgcccagtccggctaaagtgttgcccgaaaattggtggcaacatcctgctgcattaggtgcaaccgacagcgatatcgaaatcatcaaacgtcaatggggtgcgttttacggtacggatctggagttgcaattacgccgccgaggtatcgatacaatagtgttatgtgggatcagcaccaatatcggtgttgaatccaccgcccgcaatgcctgggaacttggctttaatctggtgattgccgaagacgcctgtagtgccgccagcgccgagcagcacaataacagtatcaaccatatctacccgcgcatcgcccgtgtgcgtagcgtggaagagatcctcaacgcgttatgatttacatcggtctaccgcaatggagccatcctaaatgggtgcggttggggatcaccagccttgaagagtatgcccgccactttaactgcgtggagggcaacaccacgctttacgccctgccgaaacccgaggttgtcctgcgctggcgtgagcagaccacagatgacttccgcttctgttttaagtttccggcgaccattagccatcaggcagcattacggcattgcgatgatttagtgactgaatttttgacccgcatgagtccgttggctccgcgcattgggcaatactggctgcaactgcctgccacattcggcccacgggagctgcctgcgctttggcattttctcgattctcttcctggcgaatttaattatggcgtggaagtccgccatccacagtttttcgccaaaggagaagaggaacaaacgcttaatcgcggtttacatcagcgcggcgttaatcgggtgattttagacagccgcccggttcatgcagcacgtccacacagtgaagctattcgcgacgctcaacgaaaaaaacctaaagttccggtacatgctgtactgacggcgacaaatccgctgatccgttttatcggtagtgatgatatgacgcaaaaccgggaattatttcaggtctggttacaaaaattagcgcagtggcatcagaccactacgccttatctttttttacatacgccagacattgcccaggcaccggaactggtacataccctgtgggaagacttacgtaaaacgcttccagagatcggagcagttccggctattccacagcaatcttctcttttctgaatttgccacctatcatagacaggtgccatcggccattttaaagggagtttgtatggtaagcgcgctgtacgccgttttaagtgcgttgttattaatgaagttctcttttgatgtcgttcgcctgcgaatgcagtaccgcgttgcctatggcgacggcggttttagcgaactgcaaagcgctattcgcattcatggtaacgcggtggaatatattcccatcgcgattgtgctgatgctgtttatggaaatgaatggcgcagaaacctggatggtgcatatttgcggcatcgttttgcttgctggtcgtctgatgcattattacggttttcatcaccgtctgttccgctggcgacgttccggcatgagcgccacctggtgtgcgctgttgctgatggtgctggcgaatctttggtatatgccctgggagttggttttctccctgcgttaacgcacaatacgccactttctttttcccggatttttacgttatgtctcaccgcgacacgctattttctgcccctatcgccagactgggcgactggacctttgatgaacgggtagctgaagtcttcccggatatgatccagcgttccgtacccggctattccaatattatttccatgattggtatgttagccgagcgcttcgttcaacctggtacgcaggtttacgatctgggttgttctctgggcgcggcgacgctcagcgtgcgtcgcaacattcatcatgataattgcaaaattattgccatcgacaactccccggcgatgattgaacgctgccgtcgtcatattgacgcctataaagcccctacgccagtagacgtcattgaaggtgatattcgcgatatcgccattgaaaacgcaagcatggtggtgctgaattttaccctgcaattcctggaaccttccgagcgccaggcgttactggataaaatttatcaagggctgaaccccggcggcgcgctggtgcttagcgaaaaattcagtttcgaagatgccaaagttggtgaactgttgttcaacatgcaccacgactttaaacgtgccaacggttacagcgaactggagatcagccagaagcgcagcatgctggaaaacgtgatgctgaccgattccgtggaaacccataaagcacgcctgcataacgccggttttgagcatagtgagctgtggttccagtgctttaactttggtagtctggtggcattaaaagcagaggacgctgcatgatcgactttggtaacttttattctctgattgccaaaaatcatcttagtcactggctcgaaacgctgcccgcgcagattgctaactggcagcgcgagcagcagcacgggttgtttaagcagtggagtaatgcggtggagtttctacctgaaattaaaccgtatcgtcttgatttattgcatagcgttacggcagaaagcgaagagccactgagcgcagggcaaattaaacgcattgaaacgctgatgcgcaacctgatgccgtggcgcaaagggccgttcagtctgtatggcgtcaacatcgataccgaatggcgttccgactggaaatgggatcgtgttctgccccatctttctgatttaaccggacgcaccattctggatgtcggctgcggcagcggttatcacatgtggcgcatgattggcgcaggcgcgcacctcgcggtggggatcgaccctacgcaactgtttctgtgccagtttgaagcggtgcgtaaactactgggtaatgatcagcgcgcgcatttgttaccgttaggtattgaacaacttccggcactgaaagcctttgataccgtctttagcatgggcgtgctttaccatcgccgtagtccgctggagcatctatggcagttgaaagatcaactggtcaatgaaggtgaactggtgctggaaacgctggttattgatggtgatgagaacacggtgctggtaccaggcgatcgttacgcgcaaatgcgtaatgtctatttcatcccttccgcgctggcgctgaaaaactggctgaagaagtgtggttttgtagatatccgcattgcggatgtgagcgttaccaccacagaagagcagcgacgcaccgaatggatggttaccgaaagcctggccgatttcctcgacccacatgatccgggtaaaacggtggaaggttatccggcacctaaacgcgcggtgctgattgcgcgcaagccgtaaaggtctggtattactgccggatgcggcgtgaacgccttatccggcctacaaaaccttgctaattcaatatattgcagggactatgtaggcctgataagcatagcgcatcaggcagctttacgtttgcataacctcagcgcccgtttccgggcgctattcacgtcttacgcctgaacagctggctgatcaaacgccgttaacttcggtgcattgcccgtatatttttcgatatacaccaacgcactgttaccggcacaggcatttgccagctggctgctggggatatccgccgttaacacgttcgcactgccgtttttacacaagccattttccagatctggccatgcaccttcatgcacgcataccacgccttttttgatcccgtcagtcaccaccgcgcctgtcaaaatctgaccacgtttgttccagacacgcaccagatcgccattcgcaataccaaagcgtgcagcatcttcggtgtgaatagtgattggttcacgatcggcgatcgcatattttttacgcagttccgcatagttaagctgactgtgtaaacggtgtgccggatgtgcggtcagaagctgtaactgcttctcgtcggcggtacctttccattcatcaggagccagccaggttgggtgtgccgggcaatccttatagccaaatttttccaacgttttactatagatttcaattttgccgcttggcgtacccagcgcatttttcaccggatcggcgcggaaatcaccataacgaacgtactgttcgttcttctcgctgtggcgcatttcgatcagtttattttgctgccagaaggcattaaacattggcatagtgacgcgttgcgcacgggcacctttctgagcggcatcatagaaaaatttcagccacgccatttcatctttaccttcggtatagatctcttttccgccaggtttgagtaattccgcaagatcggcaaacacgtcaaaatcgttacgcgcttcaaattgcggagcaacagcctgcttcatcggcacaatatgctggttgctgtaatcaccggtcatcgtcaagtcattgcgctcaaagcttgtggtgatcggtaatacgatatctgcgtgtttggctgctgcggtccagtagcattcagaaacgacgatcatctccggtttctgccatgctttaatcagacgattagtatcctggtgatgggtaaagttaccgccacccgcccaccagatcattttgatattcggatacgtttgttctttaccgttatgctgatatttgccgccaggattttccagcgcatcgacgatacgggcaacaggaatcgccgtcattccgccatcatcagcggcctcgctggcatgtccggcaatcgccgcagacatttccggcagcacgccgccaacacgcgtcgggttgccaccgttggagtaatgataagagaaaccaaaaccgccgcccggtgtaccaatctgccctaacatcgccgccagcgtcaccagcatccagtgtttctgttcaccatattgctggcgctgaattccccagcctgccatcagcattgtgcgattcgccgccatcagttcagcgagtttgactatctgcgcttccggtacgccagtaatttccgccgcccagaccgcgctcttcggcgtattatcgctcttacctgtcagatactcttcaaactgcggatacccggtagtgtatttttcaaggaacactttatcgtgtttgccttgtgtcatcagggtatgcgcaatccctaacatcagtgccacgtcggtgcccatattcggcgcgatccaggtggcattatcgtcaaagaattcgatggtttcggagcggataggatcaatggcaatcactggtttgccagattttttcagctgatggaagtattccagcccttgctcatcggtactgctccaggcaatttttaaggtattcagcgggttcattccccacagcaccacaacctggctgttttccagaatcagcggccaggaggtctgctgttcatacacctctacagaaccgaccacatgcggcatgatcacctgtgctgccccggtactataatcgccgctatgcccggaataaccgcccgccaggttcatataacgttgcagtaaggtttgcgctttatgcaacacgccagaagagcgccagccgtaagatccggcaaaaatggcgcttggtccgttagctttacgaatacgatcatgttgctcatgaatcagttttaatgcctgttcccagctcacctgtacataggtatcttcgccacgacctttcgccggttgcagtggattatcgagatagctttttctcaccatcggatgctgaatacgcgccgtggtgtgtacctgatccgccgccgtagactgtaaggaattcggtatggttttcgccagcgcgcctgtactagaaacaatcttgccgtccttcacttctacgttcatcgctccccaacgtcccgcggtgaggattttaccgcccttctcttctgcccatgcggggagcggtgctgcgcttgtcaccaccagcgctccagcggcaataccgctgtgtttaataaattcacgtcttgttaatgtcataacttcctccctgatcaacgaggatcactgtttctcggtaatatctttggcgttgtactggaaataccgcgttaaaatgtccagttcgttttcgctcatgctggttcgtgcccccattcctttggcaatggacggccacgcattgacggtgtaatggtcggcggcaataggggcatgacaaccagcgcaataggtatcgtcaagtttttcagcgtattgccatagcggtttacggtccgctaatgcgggatcggtaagcgcaccctgtaaagacgcctgacgccattgattgccgtattcgtcagcctgccattccccgtttacagtgagcgccttgataccttcttcacttaatgtggctagcgccagccgttgacctgccgccaggtagagcgtgttttcactgccctgcatttgataaccctgcaacagaacgatcggctgtttgccactggcatcaacgacggtgagatcggttccaggattcacggtagccagctcgcctatgtgagaagttttgaaaggataaatatgtgcgccattagtaacactagtagcggcctgactttccagctcatgcgccgcgttgtcatccatttttatttctggcggaaaatgggcaatgcctttatgacaatcgatacaggtttcgctgtccttttgtgctttgttatgcattttctgcgcagattcactttggctggcaatatccatggcatcaaaagaatggcaactacggcacgttgcagagtcagtggcttttaattctttccatactgtttcggccatttcctggcgatgagcttcgaacttatcgtcactgtctattttgccgctaacaaattcatgataaatatctttagatgcctttaatttagcaaataaataatccatcccactctttggaatatggcaatcggcacattccgcacgtatccctttctggttgctaaagtggacagttccctgatattcctcaaaaggtttactcatgctgtggcaggaaaggcaaaatgctgtatcgctcgttttatgtaagactttttgcgccagcaataacccgccgccaccaaccacaaccgctatcagcaaaaacaataacccaatgcgttttttccctcgcatagattcctctaattaaattactggacaccgaaatcattgtataattaaatatacaacgaattaaccgcttgcataattaggcacaacactgcctgaaacaatcgataaagaatatgatttattacaatgtaatcattaattgctaaggaataacccagttgctatttagaatatatatttatcagttttagtaatttaaatcccataattaatgtgaatatatacaatatttttagcacaacgctatgcgcactgtcacccgctcaacagatcacggttatcgttcgttttttatactgttcagggataaaaaaaggcccctgttgaaattgcaggggcctggtacgagcaagcatcatattgggcgacatgatgcaacggtaaaaatcatttggcctgatggcgttcaatgattcctttcatttcagcaaccgccgccccgtctacgatataacggctatactcgtccgcgtgttcatcactactcatggacaatccttgattacgataacgcatcggactggcttgccacgctcccgcggagctatggacttccagcactccggcatcgaggaagtggtgcaggttttctgcacggactcctgctccggccataatgattggagcatcacgatgggcaataagttccataattttacttaaaccttgcagtgcgtcacttttttgcccacttgtcagtacccgggcaatgcccaattccgcaagattattgagtgtatataaagggttagcgcacatatcgaaggcgcgatgaaaagtcactgccagcggaccggcagcagccattattttttccattcgtggcatatcgacattcccgtcaacatcgagaacgcccgtcaccagtccaggaaaacctaattcgcggaccgtgcgcacatcctcaagaatggcggcaaactcaccgtcgctgtagcaaaaatcaccaccgcgtgggcgaattatcggatgcacagggatcgtcacccgctggcgcacggatttcagtacacccaagctcggcgttaagcccccctcttttggggctgcgcataattcaactctgtctgcgccgttttgctgcgccgttagtgcacattccatgctgtaacagcaaatttccagtaatgccatttttactccttaattacgcgctctgctcgctggcaacgatctcttcaatggaccacggatgaaacttaatagttgttttgccatcggtgaccgccagcgtcggattcggtaatcgctcatgctcaccttttgggctactggttttcacactgatccccggtaggctgagtccttcatcagaaagcaatgccagcgcacgggcattcagcgtttctggatcacccggcagaacgatttcaatatgttcccaaccttcgtgtgggtaacgtttttccccgggccacggtagctccacaatagaaaactgccagtgcgcaacctgtaccggttcatgcaatttaaacagacaaatcggtctgccattgatcatattttcactcaaaagctcgccacactgttcaaacccgcgacgccagcgttcagcagtggcgttttgatggcaacgcaaagaaatgtgatcggcagtcagcggagtgatattcaaccccagacggcgggaaagttcatctaatgcgtggataaatcgcggtaaatcgcttgcaatatcctgcagctcgtcgatagattgccagttcgccataatcactcttcgtctttcagtaaaagcgttaatttaccctgttgccctgtgccaaccaaccgctgatttcacgccgcttctgatgcaatagtgaaaacggcaatacgccacgcgcacgttgctgacgaaaacagccatttgcagtatactcccgccctaatttctttaactggtgcgggcaatttttgctcgcttcatcaatgtaaggtattccggtgaatattcaggctcttctcagtgaaaaagtccgtcaggccatgattgcggcaggcgcgcctgcggattgcgaaccgcaggttcgtcagagtgcaaaagttcagttcggcgactatcaggctaacggcatgatggcagttgctaaaaaactgggtatggcaccgcgacaattagcagagcaggtgctgactcatctggatcttaacggtatcgccagcaaagttgagatcgccggtccaggctttatcaacattttccttgatccggcattcctggctgaacatgttcagcaggcgctggcgtccgatcgtctcggtgttgctacgccagaaaaacagaccattgtggttgactactctgcgccaaacgtggcgaaagagatgcatgtcggtcacctgcgctctaccattattggtgacgcagcagtgcgtactctggagttcctcggtcacaaagtgattcgcgcaaaccacgtcggcgactggggcactcagttcggtatgctgattgcatggctggaaaagcagcagcaggaaaacgccggtgaaatggagctggctgaccttgaaggtttctaccgcgatgcgaaaaagcattacgatgaagatgaagagttcgccgagcgcgcacgtaactacgtggtaaaactgcaaagcggtgacgaatatttccgcgagatgtggcgcaaactggtcgacatcaccatgacgcagaaccagatcacctacgatcgtctcaacgtgacgctgacccgtgatgacgtgatgggcgaaagcctctacaacccgatgctgccaggaattgtggcggatctcaaagccaaaggtctggcagtagaaagcgaaggggcgaccgtcgtattccttgatgagtttaaaaacaaggaaggcgaaccgatgggcgtgatcattcagaagaaagatggcggctatctctacaccaccactgatatcgcctgtgcgaaatatcgttatgaaacactgcatgccgatcgcgtgctgtattacatcgactcccgtcagcatcaacacctgatgcaggcatgggcgatcgtccgtaaagcaggctatgtaccggaatccgtaccgctggaacaccacatgttcggcatgatgctgggtaaagacggcaaaccgttcaaaacccgcgcgggtggtacagtgaaactggccgatctgctggatgaagccctggaacgtgcacgccgtctggtggcagaaaagaacccggatatgccagccgacgagctggaaaaactggctaacgcggttggtattggtgcggtgaaatatgcggatctctccaaaaaccgcaccacggactacatcttcgactgggacaacatgctggcgtttgagggtaataccgcgccatacatgcagtatgcatacacgcgtgtattgtccgtgttccgtaaagcagaaattgacgaagagcaactggctgcagctccggttatcatccgtgaagatcgtgaagcgcaactggcagctcgcctgctgcagtttgaagaaaccctcaccgtggttgcccgtgaaggcacgccgcatgtaatgtgtgcttacctgtacgatctggccggtctgttctctggcttctacgagcactgcccgatcctcagcgcagaaaacgaagaagtgcgtaacagccgtctaaaactggcacaactgacggcgaagacgctgaagctgggtctggatacgctgggtattgagactgtagagcgtatgtaatcgatttttcgtgagagtgaagcctgatcagggttagccgatcaggcttttttattgccatctaaatgtattctgaaaatggacatgccattgttttctcactgttggataagaggccagaagcgtaatatccggccccagggaaacgataacggttgaatttaaggaataccgcagtgtttaaatttcttgtattaacattaggcattatctcttgccaggcttacgcagaagatacggttatagtaaacgaccatgacattagtgccatcaaagattgttggcaaaaaaatagtgatgatgatactgacgttaacgtgatcaaaagttgcctgcgacaagaatacaatctcgtcgatgcgcaattaaataaagcctatggtgaagcttatcgttatatagaacaagtgccacgcacaggtgtaaaaaaacctgataccgaacaacttaacttgcttaaaaaaagtcagcgagcctggctggattttagggacaaagaatgtgaattaatccttagtaatgaggacgttcaggatttaagtgacccttattctgaaagtgaatggctcagttgtatgatcatacagaccaatacgcgaactcgccagttgcagctataccgtaactctgaagatttttatccaagccctttgacaagaggataattcacatctttttggcatgttttgttgcaagctattcctgataaataattgcaacaagacatcgagcctttttcactgagttattaaacatactcgcgagcgcgtcgctacgctagcaagcaaaaatgaaacaggaataatcgaaatgggatgttgcgcacagtcaaaataactcaccgtaaataatcatctgctataaataatcactttcatgcaataccagataagctatttttaaacagacacttaccgcacaacaaactaattaaatacaaagaaaggcaacaatcaacttaatgttaatgaaatgttttacatatattaaccacttgtttaatgcggagaatcagtacactattttcttataattacatttgaaattatatgatcaccgggagtgattgattaattatctttactaataatcagactaatatttacctgtttgaccgagttgggattgcgtcgtttctccattaggagtaaagctttaatgtcacctgaagttcacagaataaggaacaggttatgagctatagcaatattcttgtcgctgttgcggttacaccggaaagtcagcaactgctggcaaaagcggtatctatcgccaggccagtaaagggacacatcagtttaattactctcgcttccgacccggaaatgtacaatcaattagctgcgccgatgcttgaagatttacgcagcgtgatgcatgaagaaacgcaaagctttcttgataagttaattcaggatgcggggtatcccgttgacaagacgtttattgcctacggtgagttaagcgaacatattctggaagtatgtcacaagcatcatttcgatttggtgatttgcggtaatcacaatcacagtttctttagccgagcatcctgcagcgcgaaaagagttattgccagtagtgaggtcgatgtgctgttagttccacttacgggagattaaccgctcttacgcaagctttggaaaggtagcaactttatcgcgctgctggctttccgcgcttcgcggaactatctgctttaggtcgctaatgaagcactcctgccagtggttaatatcgtttttcacgataacgtccagcatttctgcatgacgggaaatacgttccgccaggctcatagtcaatgcacgatccagcgcagctgcaacttcgtcacgatcgtaggggttaacaattaacgcgctcgttaactcgtttgccgctcccgcaaattggctaagaacaagaacgcccggattggctgggtcctgagcagcaacatactcttttgctaccaggttcatcccgtcacgcagtggcgtcactaagcccacgtcagagtagcggaatattttcatcagtaatttacggtcaaaatgctgattcaaataataaagcggcgtccagcctaattgcccgtatttaccattaattcgtccagcttcattttcgagctgatgacgaatatcctgataggcttgcacatcaccacggctcgttggtgcaatctgggtataacgaattttaccatgatgctgcggatatttttccagcaacgcttcataggcgagaaaacgctctggcaaacctttggaataatccagccgttcgacagaaaagatattttgtacgtttttcagttccgctttaagttgcgccagttttggcggcagtggcccggcagcctgtttggctatttctttcggttcaatgccgatcgggtagacttctgttcgaaatgctttgccccaggctgtatggctttttgcgctacgtgtcgtgacgcgggtcaggttagaaagacaatccaggaacgccagacgatcgttttctgtctggaaacccagcaaatcataatcacaaagctgttcaagcaaggtgtcatatgtcggcagcgcgttgaagatttccggtgtcgggaaaggaatatgcagaaagaaaccaatgcgattattcactccccgtttgcgtaattcatgcgcaaatggcaacaggtgataatcgtggatccagataatgtcatcgtcttgcaacagcggcagtaatttatctgccagcaacgcatttacgcgtagatagccgtcccaggcaggacgctgaaattgcaccagatcgagccgataatgaaaagcgggccagagaacggcattggagaattggttgtagtattcgtcaaggtcctgttcgctgaggttaaaagaggcccacgtaatgttaccttttttcaccttttttagcggctgatcctcattccctgtttcaccactccagccaaaccacagtccgcctgcggctttcagtgcccccagtatgccaacggcaaggccaccggcactggcggcgtgctcgtctggtggtgcaatccggttagatactacgactaaacgactcatagtcatcactcctgttatttttacttagatactacgactaaagctctcatagtcatcactcctgttattttctcttttttgttgtaatgcggtggttatcatttcaagccagctccagacatccggcacacccgccagtcgccaacttgcctgagttgcacctgtgccaatttttacactcattccgcccagtcggttaacgactgcgaagccagattcatcggttaaatcatcgcccagaaatacgggcgttcgcccgataaagggagcttcctgcataaaagctgcaattgcctcacctttactggtacctctcggtttgatctcgacaacacactttccctgctgtaacgccatttgtggccagatctgagtaatacgttgcgctaatgtcattaatgcgtcttcatgctgcggagcctgacgataatgcagcgcaaaagccatccctttcgcctccagctccgcgccgggatactgagcgatgactgtatgcagttgcacgctaatatcacgcgcaatcgcatccggcagatgaacgatatgtgttttaccattgatgtcacggcgctccgccccatgcacgcccgctaacgggaagcgataaggttttgccagtgcgtcaagctccaccatactgcgcccacttatcaatgccaatgcaccatcacttgcggttgccagtagctgtagtccttgcagaatattgtcaggcacgacgacctgatcgggatgcggtttgatttccgccagcgttccatcaagatcaaaaaaccaggcatatttcgcggatagttcaggggtttcggttaacggttctgtcacccggttctcctccttctcttttcttattgtgttgcgcagaacgcgctttacagacatgtaagtatagacagtgtgacgggggtcgccatttgcaacgaagaacagccaaccgttatggcggttggctatggtgggaaaaaacgctaaattgttgcagaaaaaagcatcagacagtgcgtttcgctttttgcttgtaacggtcgaagatcaccgctgccagcaggattaagccgcgaaccacgtactgcgcgaaaggagaaatattaagcaggttcatggcgttttccacggtgcctaaaattaagatacccgccaccacataactgatttttccgatgccacctttcagagaaacgccacctaaaacgcaggcggagataacaatcagctcataaccaatgctcgtcattggctgcccactggtcatacgactagccagaataattccggctatcgcacttaccaggccactgagaacaaagataataattttggtgcgaacaaccggtacacccgccagacgcgcggcctcttcgttcccgccaatcgccagggtgttacgaccaaaggtggttttattcagcagcaaaccaaagataatcagacacgcgacggtgagccagattggcgcaggcagaccgaaccagttggcgtaaccaagggcaaagaagctttcatcttcgataccgaccgctttaccgtcactaatgatgtacgccagacctcgaacaatctgcatcgttgccaatgtcgtgatcagagcatttattttcagtttggcgataacaaagccattgaccaggccacagagaacgcccagcaacaaccccgctgccacgccaatccacaggctttcagtcaggttaataaccaccgccgtggtgacacccgcacaggcaattacggaggcgacagaaaggtcaaagtcaccggaagcgaggcagaacaacatgccacaagccaccatcccgctcatggaaattgccaggcccaaccctttcatattaatgaaggtggcaaaatttgggacaaaaatggcacaggcgataaagagcaccgcaaacaccaccagcatgccgtactgatcccagatacgcccgaagctgaaactgctcttaggtgcgccagacccgcttgtagaaacagaagacatcatactctccttactcaggcaacagcctggctgactttaggcatcgcaaggctcagtgcctgacgctcatctgcctgctcgtgtaacaattcaccggcgatttcaccttcccgcatcaccacaatccggtcggcaacgccgaggacttcaggtaagtcgctggaggcaaacagcaccgccacgccctgcgccgccagcgcataaattacgttatatatttcgtgcttagcgccaacatcaatgccgcgcgtaggttcatccagcaaaatgaccttcatctcttcgcttaaccagcggcccagaatggctttttgctgatttccgccactgagattcatgatcagttgctccgcgcccggcgttttgatgttgaggctacgaatgtggtgatcggcattgttttcttcccaaccgttgttgattacacaaccgccgagcacatgtttacgtctggcactgatgttgatattgtcgcgaacggagtgcacgggaataatgccttccgctttgcgatcttccgggcagagcatcatgcctgcggcaatggcgtggctcggtttacgaatatcgatcggctgttggtcgatataaacctgaccggcggtgatttgcgtcccgccaaacatgcctttcattaattcgctacgccccgcccctaccagaccaaacagcccaacaatttcaccactgcgaaccgccagacttattggcgtacgcacgcctggtgctttcacagcatcaagacgtaggcgctcctcgccataactacgcggttgccagccgtagatatcgccaatgtcgcgcccgaccatcgcctgcaccagcgcgtcgtggtcaacctgctgcatatcggtaaaggttttgacataacgtccatctttaaagacagtaatggcatcgctgagggcaaatatttcttccatacggtgagaaacgtataagattacccgcccctcttttcgcagttcacgaataacgcggaaaagattgtcgatttcacgggcagagagggagctggttggctcatcaaaggcgataattttggcgttacgcgccagcgctttggcgatttcaaccatctgccactgaccaatggagagatatttcagcggcgtgtccgggtcaatatccataccaagatgtttaagttgtaaacccgcctcataattcagcaaactgcgattcacaatgccgcctttatgcggcagctggccgagatagatgttttccgcgacggtcatttccggcacgagatgcagttcctggtaaataatcgccacgcccgcgttaagtgctgcggtcgtgtcggaaaaggacatttcctgcccattaatcactacagaacccgtggttggcgcatagttgccgctgaggatttttaagagagtactttttcctgcgccattttcacccatcaacgcatgaacctgaccggcatagcagtcaaaactaatatccgtcagcgccttaacgccgggaaacgttttaccgatgccgcgaaaactgagatacggggtagactgttgcataacgtctccgtgaatcactggtcgttcacaccccctctgcatcatgcagaggggaatttttccggcaaattacttaccgcctaaaccttttttctccagttcttctttaaagttgtcacgcgtgatcagtaccacgtcggtaacttcggtaaattttggcggttcaacgtcttttgctacccagttgtaaagcatttcgctggatttatagccatgtacgtccgggcttggcagcagggaaccgtagaagccggttgcctgtgctttagacagttcgctcaccgcatccacaccgttaatgccaatgccgatgatatcggccgctttaaagccctgaccttccgtcgcgcgtacgccgcccagcacggtgctgtcgttcataccgacgatcagccaatgtttaacttccggatgttgaaccagcatactgttggcagcgtcaaatgcccccgggatgtcgttagatttggtaggtacctgataaatttgtttttccgggaatccggccgctttcagcgcatccatagatcccgtagtacggcggcgggcggtatccagttcgttggcggtaatcgccatcaccgcgctttctttgacatcccagccacgtttctgcatctctttatacagttcctggccctgacgttcgccaattttagtcgccgccatcatcaccagcggaacggtatccattggcttacctttggcgttaacaaactggtcatccacggcaatgactttcatatcgtagccacgcgctttcgcgacgatggcagagccgagtttggggtccggagtacaaataacgaaaccttttgcgccactggcagccaggctgtcgatcgcgttcaatgttttttcgccatccggcacggcaatcttaataacctcaaaccctaaatccttcccggctttatcggcaaacttccattcggtctggaaccacggctcttccggttgcttcaccagaaaaccgagcttcaggttctccgccatagcggattgactcataacggctgccagaccaatggctgccagggctttagtaaatttgtgcatggttctctccagctttagtgtcgttttgtgtagggcaaaaacgaatgacattcgttaaattaatcggaaaacaaagcattaccttttaactaaaagataagtgactgtgttgacatagttttagcgagaaattaattctccataggagagcaatatcacatcgcagaattacagtgagaacgtgcataaatttagcgggaaaagacataagggaaagccaatttgtcagacaaattgtcgaatgcacagcagattaatccataagattagcctggaaatccttgttgtctttggtacccatgcgggatgtcttctttttaaccagtcaataggccgcattacctggcgttgagtttttgaaatggtgtaataaccgcaactcaaagatgtggaaaatgcacgtcattcatttcgtcattaattatcactgtgctcattaattaacagaacacgtataatgagagccatctcgcaaaaatgaaaaaacgttttataaaatcatcacttcatcatgaattcaaattcattgattaatatcaacaagatacaaaaagcactatcattaaaattcattgcagttacattgatttcatcaatgaaatgtaaaaatatataaacttgatgatttaagcattttcttatacccgttcagacgttattcttatttcagatcatcgtcagaattgactccacgatcacatttcggaccggcagaaaggaattattctgcaaacagtaattatggtgttttgatttatcttgcacctctccacttctggatataaggatattaggtatggcaaccgctggaatgcttctcaaactcaactctcaaatgaaccgcgagttttacgcatccaatctctaccttcacctgagtaactggtgttctgaacagagtctgaacggcaccgccactttccttcgcgcccaggcacagagtaatgtgacccaaatgatgcgcatgtttaactttatgaagagtgtcggcgctacccccatcgttaaagccattgatgttcccggtgaaaaactgaactctctggaagaactgttccaaaaaacgatggaagaatacgagcaacgttctagtacgttggcacagttagccgatgaagcgaaagaactgaatgatgatagtaccgtcaatttcctgcgcgatctggaaaaagaacagcagcatgatggtctgttgctgcaaaccattcttgatgaagtgcgcagtgcgaaacttgcgggtatgtgccctgtgcagaccgaccaacatgttctgaatgtcgtgagtcaccagctgcattgatcatcatcggcgctaatgcattgcgccgatgaaggttttgagaaaccgctgcctcatctgtttgaagcagcggtttttttaatgggattcaccctgtggggtaaacttgagttcaataagcgcgatggctttttggattgcccgcatggtgaccgggtctgcggcggcgggatggttagtaaagtcgatattcttcagctgactggacattttttcacgaacttcaacgggcgcgattacatcgagaacatccagaatttgtttgataaccaactggcaagcaaccacatcagaaaccaattcctgatcggcattcagcggctgggacatcgtaaactcctgatagcattttgaaagccgttatagtagcgacttcacatcttcagcgatagtcacatccaccgtcatcaggacacaaaaaaacctgccggagcaggttttttgttatcggaacatattgcctggcggtacgtctttgaacgtcttgcaatagttattgaacatacttttcaggattttgcgcagtttcatcgcggcactccgaccatttgttatacaggtgttattgtctttgcgcttataatatgacaaccatcacaaaaatcaatctttatgtgatacaaatcacataaatacccctttaatgttataaaaatgataatcaaaaaacagcccccctatttctgacacctacagatggcaagaaatagcgcctgccaggcgtcttttccggccattgtcgcagcactgtaacgcgtaaaatagtgctttctcttactcttctggctggaccatgagacttctgattctgactcttagtttaataacgctggcggggtgtacggttactcgccaagcccatgtgagcgaagttgacgcggcaacaggtattgtacggttagtttatgaccaggcttttttgcagcatgcccataccgatcgttatgtcagtcgcgggatcgccgatcgcgcatgccagcaggaaggctatacccacgcggtcccctttggtcagccagtaggcaactgtagcctttttgcgggttccttatgtttgaatacggaattcactttgagttatcagtgccatcattccgccttccctgtctttctctaaatattttaatcagcgaggggatcttcgctgattaaagaaatagcggtaatgcgttttattcccattcgtatttttaataattgaagtttatattttaccttttgcaaataataaaataacaaattatagtgacgccacagcaacaaatataacctttgtggagcactatcatgctgaaaccagaaatgattgaaaaacttaatgagcagatgaacctggaactgtactctagtctgctttatcagcaaatgagcgcctggtgcagctatcataccttcgaaggtgctgccgcgttcctgcgccgtcacgcccaggaagagatgacgcatatgcagcgtctgtttgattacctgactgataccggcaatttaccgcgtattaataccgttgaatctccgtttgctgaatattccagtcttgatgaattattccaggaaacctataaacacgaacaattaatcacccagaaaattaacgaactggctcatgctgcaatgaccaatcaggactacccaacatttaatttcctgcaatggtatgtttctgagcagcatgaagaagagaaactgttcaaaagcattattgataaattaagcctggcaggcaaaagcggcgaaggtctgtattttatcgacaaagaactctctaccctcgacacacaaaactaatgctctccggcggcaggtttactgccgccgtttcaaatcagtgacggcaaatcttactctgatcggtgctaaaaccgtctttgctaggtataaatttgccttttgctgccagaaacgctaccagctctcccgctgtcatcccttctgcgctgcaggtgtgaaaacgtgcctgttcaccaaaacgcgctttaatcgcagcttccagactggcatgcgtatattgctcgccactttcaatcatcatatttaacacttcatgaccgtgaatagagtccatcgtccctcctcaaaaaaagcctagcgtagcgattgccgcttatgaagactttgcgccagcgcaggactgaatgctttttattgtacatttatatttacaccatatgtaacgtcggtttgacgaagcagccgttatgccttaacctgcgccgcagatatcactcataaagatcgtcaggacagaagaaagcgtgaaaaacagaaccctgggaagtgtttttatcgtggcgggaaccacaattggcgcaggcatgctggcaatgccgctggctgcggccggtgttggttttagcgttacgttaatcttgttgattgggctttgggcgttgatgtgctacacggcgctattactgctggaggtgtaccagcatgttccggcagataccggtctgggcacgctggcaaaacgctatctgggacgctacggtcaatggctgacgggcttcagtatgatgttcttaatgtatgctctgactgcggcatacatcagcggtgccggtgaattgttggcctccagcatcagcgactggacaggtatttctatgagcgcaaccgctggcgtgctgttgttcacttttgttgccggtggcgtggtttgtgtcggaactagtctggtcgatttatttaaccgttttctgttcagcgccaagattatttttctggtggtaatgctggtactactgctgccgcatattcacaaagtgaatcttttaaccctgccgttgcaacaggggctggctctgtctgcaatcccggtgatttttacgagctttggttttcacggtagcgtgccgagtattgtcagctatatggatggcaacattcgtaagctacgctgggtgtttataatcggtagtgcgatccccctggtggcatatattttctggcaggtggcgacgcttggcagcattgatagtacaacctttatgggattgctggctaatcatgctggattaaacgggctgttacaggcgttacgcgaaatggtggcctctccgcatgttgagctggcagtgcatttatttgctgatttagccctcgccacgagttttctcggcgttgcgttaggcttatttgattatctggctgatttatttcagcgtagtaataccgttggtggacggttgcaaactggtgcaattacgtttctgccgccgttggcgtttgcactgttttatccacgaggatttgtgatggcgctgggttacgccggtgtggcgctggcggtactggcattgattatccctagcctgttgacctggcaaagcagaaagcacaatcctcaggcgggttaccgggtcaaaggtggtcgtccggcgctggtggtggtgtttctctgtggtattgctgtgattggcgtgcaatttttgattgcggcagggttgttaccagaagtggggtgatcagatagcctcaaattccttattgggtgccagaattaacgctgacacccaatttggcctcttaatgcaggcagcactgcttaaatttcttaccactaccgcacgggcaaggatcgttacgccccggtttctcttctgctttgatcggttgctgaacagctttttcctgcggatgcgccatccagtacgcatgtagatcaagcgccgccagtcgaatggcatctacgctctcttcaaacgcttctgggctcatcttttctacccgctcgaagttttcctcagtaccgtgcagcgcaatcgcctccagcgctggttttaagctatcgggcaacgtactccagtcagaaagtgccacgccccgcatatagccaaagcaccactcctcaacaatcgtcagctcgctgccatcaacttctcgcaagccgaataacggctcaaactgctccgggaattcgttcagacgctctgcggtatcggccatatgttgaaaagccagattcataaagcgcgtcatctctttctcactcgcccagcgcggcacatagtcagccccaccccacacggcaaccagccactgttccggttcaatctcttgcggagaactcaacaccgccgtcaataaaccgtccagctccgccacatcaaggatggcgtggtcagtgttgtatttggtcagaatatcgtccagccattccaactcactttcgtttaacggtcccgttttcatacgcttttccttgtggatctcaactcgccagcacctatcttacatgccggtccgtatcagagatactttttgagtggctttgctggtgattaaaaattaaggagggtgtaacgacaagttgcaggcacaaaaaaaccacccgaaggtggtttcacgacactgcttattgctttgattttattcttatctttcccatggtacccggagcgggacttgaacccgcacagcgcgaacgccgagggattttaaatcccttgtgtctaccgattccaccatccgggctcgggaagaaagtggaggcgcgttccggagtcgaaccggactagacggatttgcaatccgctacataaccgctttgttaacgcgccaaattcttcaggcctttcagccagacatccgcttgacgccgatgtcttttaaactggagcgggaaacgagactcgaactcgcgaccccgaccttggcaaggtcgtgctctaccaactgagctattcccgcattcatcaagcaatcagttaatcacttgattttattatcgtctggcaatcagtgccgccgttcgatgcgttgcattctacttacctggcgcgatgagtcaacgatatttttcaccacttttgatcgtttgctgaaaattacgccgaaacgatcactgatcaagcaaatctgcacgcgcagcgctcaaatattgcaacatactccacagagtcagtaccgcagccacaaagaaaagtgcaataccggcgtactcaacccaaatgttcggacgccacagcagccatgccaacgccaccatctgggcagtggttttcactttcccaatccaggagacggccacgctactgcgtttacccaactccgccatccattcgcgtagcgcagaaataataatttcacgggcgatcatcgttgccgccggtaatgtcacccaccagctgtgataatgctcggttaccagcaccatggcgatagccacgagaactttatctgccacagggtcaaggaaagcaccaaaccgggtactctggttccagcggcgtgccagaaaaccatcgaaccagtcagtcaccgccgcgacgcagaaaatgagcgcggcggcaaacgggctccaggtgacaggcagataaaagaccaatacaaagaatgggataaggatgacacggaacagtgtaagcaacgtagggatattaaattgcataatgacgggtaactatctgttgtcagtaagattacccctatgttgctacagagacatcaatgtttcaagctccagaagatcttttctgccagaccttggctaatacccggcacttttgcaatttcctcgacgctggcgttacgtaaaccttgcaaaccgcccatatatttcaacaacatttgccgacgttttggcccgacgccttcaatggtttccagggaactggtatttttgaccttcgcccgttttttacggtgcccgccaatcgcgtgatcatgactttcatcgcgaatatgctggataacatgcagcgcgggactatctggcggcaaactaaatccctcaccttccggctcaaagaacagcgtttccagtccagccttacgatctgctcctttggcaacgccaagtagcagcggatgatttttatcccaactgacatccagttcggcgaagacatttttcgcctgcgcaagctggcctttgccgccgtcgataaggatcacatccgggatcttactgtcgtcaatggctttaccataacgccgacgcagcacctgattcatcgccgcataatcatcgcccggcgtgatgcctgtaatgttatagcgccgatactccgcacgcagcgggccgttagcatcaaacaccacacaggaagcgacggtttgttcgcccatggtatggctgatgtcaaagcactccatccgcttcacttccggcaatttcaacacgctggcaagcgcggtcagtcgctggtgaacggtagattgctggctaagtttgctggttaaggccgtcgccgcattggtgcgcgcgagtttcagataacgcgccctatcgccgcgaggtttggtttgaacattaatcttgcgtcccgccagttcactaagggaatcggcgagcagcgttttatcgctaagattaaaatcgagcaggatctcacccggtaaggtgcgcatctggctgccttgtaaatagaactggcctacgaaggtttctaccacctcgctcagttccgtaccgccaggcactttcgggaaatagctgcggctgccgagcactttgccctgacgaatgaacaatacgtggacacaagccatgcccgcatcgaacgccacaccaataacgtcgaggtcgtcgccggtattggaaacgaattgtttttcggtgacgcgtcgcaccgcctgaatttggtcgcgaatacgtgcagcttcttcaaactccagattctggctggcagtttccatacgactaatgagttgcgtaagcacctgatcatctttgccagacaaaaacaggcgcacatactcgacctgctgagcgtattcttcttcactcaccagtccttcaacgcacggtcccagacagcgccctatctggtattgcagacacggacggctgcgattgcgataaacactattttcgcactggcgaatggggaaaatcttttgcagtagcgccagtgtttcacgtacggcatagccattcgggaacgggccgaaatattcacctttggcatgcttcgcaccacgatgcatcgccagacgcgggtgggtatcaccactcaggaagataaaaggataacttttatcatcgcgtagcaaaacgttgtaacgcggctgatagagtttgatgtagttgtgttccagcaacagcgcttcggtttctgtgtgagtaaccgttacatcaatttgctggatctgggcgaccagcgcttcggttttgcggctagcgaggttgctacggaaatagctggaaagccgttttttcaggtctttcgctttgccgacatagataaccgtaccaccagcatcgtacatgcgataaacgcctggctggctggttacggtttttaaaaacgcttttgcgtcaaactgatcactcactgactacttaatgtctccgcattacacagaccatggcgaattgccaggtgagtcagctcaacatcgccatgaatgtttagtttactgaacatacgatagcggtagctgttcaccgttttcggactgagattgagctgttcactgatctcattgaccttctggcccttggtgatcatcagcataatctgcaattcacgttcagacaaactggcaaatgggctttctgttttttctggttcgatctggcttaacgccatttgttgagcgatgtcagaagcaatgtaacgctgcccactatagacagaacgaatcgcactcacgacttcctgcggagccgcgcctttgctgaggtagcccgcagcaccggcctgcatgactttcgctggtaaagggttttctgtatggacggtaagcatgatgattttgacatcagctgtggaacgcgcgattttacgcgtcgcctcaagaccgccaatgcccggcatactcatgtccattagcaccacgtcaacggcatttgtccggcaccacttaacggcgtcttcaccgcagcttgcctcaccgacgacttttataccctttatatcttccagaatgcgtcgtatccctgcgcgcaccagttcgtggtcatcaacaagtagaacgttgatcaaaggaatatctccagaaatagggataacgctactgatagttagtcattcgtatattagcggtttttattgcaactttgaaacgttaaaaatggtgggtattcgatttttctctcgtttttgtcaattcgattgtccacagttatggtcacgcccgtcaccaacggcttaccggatcgtttcacagtaagccctacgatgaaatgtgacaaaaattgactttattcagcaaaaatgaaaatcagcccgctgaatatgtaacattaattaacccgaacaatacgggcaaaaaacattcatgataaaaatatttattggtcattatattaacgtattttatagcactgccgatatcacgctcaaaaaacaaccactgctatttttagcaaagcttatggtatactccgccgccttaacatttttcaccgcaaattttcattgcaacatgacgaggaaaataaatgagtacgcctgatttttctactgccgagaataatcaagaactggcaaatgaagtctcctgcctgaaagcgatgctgacgctgatgctgcaggcgatgggacaagctgacgcgggccgcgtgatgttaaagatggaaaaacagcttgcgctgatcgaagacgaaacccaggctgcagtattttccaaaacggttaagcaaattaaacaagcctaccgtcagtaatataaaaccggctgatagcgtgcctttcagccggtttttgcatctggcacgcaggacagaaaagagatcaaattaagccagtagcggccgcgtaacaggcaacctgggtcttatttggtgcattaatttttttctgcatgtttttctggtggaaattgaccgtattctcagagatactcaaaatcatcgctatctctgcacttgttttcccttccgccgtccacctcagaatttctttttcgcgcttgctgaaattcatctctggcgtcatcactatttcatcatttaaacgcatcagagccatcagactttcgcgcaccagtaactgcatttttaattgcagttcatcactaagaatgggtatttcgcgcgcgctgcaacgggaaaaggacaaaaagcccagcgcccggtttggcagcattaaatactgagtgacaccgcggcgtaaaccatgtgcgcgcgcggcttcccataacggctgtgcttcgctgaataagtcatcattccacattaaatggccctgactaaagttttcagggttcagcaccggatcaattgcgagaaagttttttgcctgataataactaacccacgcctcagggtaattggtgtaaaaagccactttaggtcgagtgaatggtaccgggtggcggacacataagctatagtaatcgtactccagctgctgagcctgaagctcaatttcatggtagacctcttctgcggtctccatcctctgaaaacgcaacagcatcgtgcgacgccagctgaaaaaatccttatcctgcatagtaaaccgcaacgcccttgagagtgagtatcatttataatgataattcaaactatcacataaataagatttatatataatttatattattcaggcaatgaattacttttgcaagccatcgcattctcttatgttattaatgagttatgctgatttgttaagcagttttatcaggcttgaaatggcgtccagccccgacaggtgaatcgtcggggctgattttttcttattattgcagcagaaacttctcgaggaactggcgggtgcgaggctgctcggttccgtaacgtttatcatgttatcctaaggattatccgaaaaataatacctacgaacatcttccaggatactcctgcagcgaaatatttgttttaagctcactcacatatcgcaacatttactttactttaagacaattccaggcaaattatacaacactttacgggatagtaagtccgcctgaaaaatcgcgagagtggcgcattaggtgacccatgttgttccgtttagtcatgatgaaatattcaggtaaggggaattatcgttacgcattgagtgagggtatgccatgagtacgattattatggatttatgtagttacacccgactaggtttaaccgggtatctgttgagtagaggggttaaaaaaagagaaatcaacgacattgaaaccgttgatgaccttgccatagcttgtgatagtcagcgccctagtgtggtgtttattaatgaggactgtttcatccacgatgcttctaacagtcagcgtatcaagctcatcattaatcaacatcccaatacgttatttatcgtttttatggcaattgccaatgttcattttgatgaatatctattggtcagaaaaaatttattgatcagttctaaaagcattaaaccggaatctctcgacgatatccttggcgatattctgaaaaaagagacaacgataaccagctttttaaatatgccgacgttaagtttgagccgaaccgaaagcagtatgttgcgaatgtggatggcaggtcagggaaccattcaaatctctgaccaaatgaatatcaaagccaagaccgttagtagccataaaggtaatattaaacgtaagatcaaaacgcataataaacaggttatctaccatgtcgtccgactgacggataatgtgactaatggtatttttgtcaacatgcgctaacacattctgactggtggtttcccaccagtcaggctgaataagattactctgctttctccacaaagataccgtcctgatgccctgcttcattaaagaaccagatgccgagcgggtagtcttccaggctaaccaggtacattgtgccttcactaaactcctcaactgccagtaccacgccaggacgacgcggaccgccatccgttttgactgttacccgatcattcaccttcatcgttttcctcctgtggctttgtgccagtgtagaacaatttcgtttttctggcagcgccaggcgcgcgcgagtgctgattttctcgacggtctatacttaagagatgccaggcggacttaacgactggcggcaacaacagagtaacggttgcgaggaaagatgatgaaaaccgcaaaagagtacagcgataccgcaaaacgtgaggtcagcgtcgatgtcgatgccctgctggcggcgatcaatgaaattagcgaaagcgaagttcatcgcagccagaacgattctgaacacgttagcgtcgatggacgtgaatatcatacatggcgtgaattggcggatgccttcgaactggatattcatgacttcagcgtctctgaagtgaatcgttgaatgcacaataaaaaaatcccgaccctgagggggtcgggatgaaacttgcttaagcaagaagcacttaaaaaattcgttacaccaggaaatctgatgtgttcatcaccttatccgcaatttttttcgctgacaagaaaatattcgccatatgaatgattaacgctacttatgaatagaaatgtgacgcacgtcaccccttggtggctctggcgtcagcgggatcgctcccgaaaaaatcatctttgataatttgtgcggttttgagaatcatcctggtaagaggagtactgcgcgactatgtttagtattcaacaaccactactggtttttagcgatcttgatggcaccctgctggacagtcatagttatgactggcaaccggcagccccctggctcacccgtttacgcgaagcaaatgttcccgtcattctctgtagcagtaaaacaagtgcggaaatgctgtacttgcaaaaaacgttggggctacaaggtttaccgctgattgccgaaaatggcgcagtgatccagcttgctgagcaatggcaggagatagacggttttccacgcatcatcagtggtattagccatggcgaaatcagcctggttttaaatacgctacgcgagaaagaacattttaaattcacgacttttgatgatgtcgacgatgcaaccatcgccgaatggacgggattaagccgtagccaggcggcgctgacgcagcttcatgaggcgagcgtaacgctaatctggcgcgacagtgacgagcgtatggcacaatttaccgctcgtctgaacgaactgggcttacagtttatgcagggtgcgcgcttctggcacgtactggatgcttctgccggaaaagatcaggctgccaactggattatcgcgacctatcaacaattgagtggcaaacgcccaaccacacttggcctgggcgatgggccaaacgatgcgcccttactggaggtaatggattacgcggtgattgtgaaagggctaaatcgtgaaggggtgcatctgcatgatgaggatccggcccgcgtctggcgaacgcagcgtgaaggaccggaaggatggcgtgaagggctggaccattttttctccgcccgttaagcgttatcgctcgcgaatacccgattacgcccagcctgtttagcgagataaagccgacggtcggccagactctggagttgttcaaaatcataatcaccggtttcctcgctgctgcttacccccaggctggcactgatgcgtatcgtcgtactcttggcgatcaacatctctttttcatttaatttcagtcgaatacgttctgcgacctccgcagcctccgtcagactcgcgcctggcagaatcacacaaaactcctcaccaccgacccgcccggcaacgtcctgcgcacgcaaggaactgctaattaatccggcagcatgagaaagaacacggtcgcccgcctgatgaccaaagcggtcattaatcgctttaaaatggtcaagatcgacctgaatgacagaaaaaggatgttggtgcgtctgacacaatttagcgagcggacgggctttttcgaacagtgcgccacggttatataaacgcgttaaggtgtcgtgccacgcctgccactgcaagctgctttgcagaacatacatgttgctaaccatccggcgaatcacataccaggagatgagtaacatggtggtaaagagcgcccacagcagggttaatgcaatgctgatactgccgaaatcgccgcgcacgccttcgcttaacgtatggacacgcaccagcacaccgtcgaaatggtccagacgttcccagctaacatagcgactgtccatacgaatgccgccccgcgtgtcatgttccattgcctgcgccagcaaggccagttcacgaggatcaaaaatattccctgttggatggtcaggattggaagaggtcaaaaatctcagcttactgtcatagagctgatactcaccatcgaggtttttatcgatggcgtttcttaaaaattgctgcatagtacgcacgggaatactcatccccagcacgccataccagtagttattactgtctaccggaacactgacggtaacctgcggttcagtattgctggcgtgttccggttggctagtgaaccagcgtaccgcgcggtgacgattttctcgttgactatggccaataaaccagggttgggtgacatagccgtaataacgcgttggaacattgcgcgtaaacaaggtcggctgcgtgctaacgtaaaatccggcacggctgacatacatcgcctgttcaaccatgctgctggagttgtgcgctagtcgcagcaagtaaccaacttccagtgcagcggtaatttcattgtcgaggctttcattttcgcgagacaggagattcccctcgctgactaatgcatcgctcacaccattaactggcagagtgcgtcgtcggttgagttcgattttccaggcgtgctcgtcgcgatgctgttcgaactcggttacagcatcacgcagagaggtgaaatccagtggcgctacgagagcttcgcgcatgccattacgtaaaaagatcagtttgtcgacgttatactgcaaatgcttatcgagcgcgttggcaacgttttccagatgattacgctggctggagatataggcatcttccagcaccaccacttcacgccaggtgagcaaggtggaaaaaagcaataccacgataaagcagagattaacgacatgaccaggccccaggcggcgtgcgagttttttcaaccagctctggttttccatttttgtctcgtgctgcaccctgacgactcccaacctgcttttttatgattctggcataacctggcgatagcgtaccgcaaaacagcgataattttataatggtggcatgataagacgcgactatcattcattgcaggcattagcacaccaggccggatgtgatccggcctgatgttaatgataccctttcacacttcttccgcagaacgactcccctcccccggaacaagctcggtttcatgaaaagcttcccgcttgaccccgtaaccgtcataccaacgacactcaaccataccgctggagtatccagtgacaatcatccgcgggccgccctctttaaccgtaacttcctcactaaccataaagctcatactcgcctccttttttcgagtgaaacttgttcaccttagttgaagatggcgaattttgcataatagccagtgcgagtattaatgtgcctgaccgcgcattttctctacggctttcactcccagcaccacgatgccgccgatgataaatccaagaatcagatttaaaacagtcggtaatatcatcgccactactgcactttgctgcccggcgaaatgttcaatggcgtgatgcagcggcgcaattccatgtaccacaatcccaccgccgacgaggaacatcgccagcgtgccgacaatgcttaacgctttcatcagccagggcgcgataatcaataaccctttacctaatgcctgcatcagcgcgctggatttttccgccagccaataccccaggtcatcaatcttaacgataacccctaccagaccgtagacgcccacggtcactaccagcgcgatgccactaagcaccagcacctgattaagcaacggcgcttcggccacaatccccagcgtgatggcgacgatttccgcagacaatataaaatcggtacgaatcgccccttttattttgtccttttcaaacttcagcggatcctgcgccgccagcttctccagacgctgctggctctgcgccggatcttctttatgtttacgcgcctccagcatatgcagcactttctctactccttcaaagcagagaaacgcgccaccaatcatcaacagaggcgtaatcgcccacgggataaacgcactgatgatcagcgccagcggcaccagaatcactttattaatcaggcttcctttcgccacgccccagaccacgggaagttcccggttggcccgcacgccactaacttgttgcgcattgaggcttaagtcatcccctaatacaccggcggttttcttcgccgccagtttgcccatcacggagatatcgtccagtagtgtggcgatatcatcgagcaacgtcagtaaactactcccggccaaaagcattccctctcatttttattgttgaagggtgtaagtatgaagcaaaaacggcagctctgatacttgcttcacaggtcaacatttttttaacaatcaagtgcaattatatctctcgccagcagaatgattttcacgtttactatgaaccacctttttatttccaccgtgagggattatgcgtttccgccagttgttaccgctttttggcgcgctgtttgcgttgtatatcatttggggcagtacctattttgtcattcggattggcgtggaaagctggcctccgttaatgatggcgggcgttcgattcctggcagccggtattttattgctggcatttttgctactgcgcggacacaaactccccccgctacgtccgctgctcaatgccgcgctgattggcctgttattgctggctgtcggtaatggcatggtgacggttgccgaacatcaaaatgttccttccggcatcgccgccgtagtggttgcaaccgtgcccctctttaccctgtgcttcagccgcctgtttggcattaaaacgcgcaaactggaatgggtgggtattgccattgggcttgccggaatcatcatgctcaatagcggtggaaatttaagcggcaatccgtggggcgcgattctgattttaatcggcagcattagctgggcgtttggcagtgtttatggcagccgcattaccttacctgtagggatgatggcgggtgcgattgagatgctggcggcaggcgtggtgttaatgatcgcgagcatgattgcgggtgaaaaactgacggcgctcccttcccttagtggcttccttgcggtcggctatctggcgctgtttggtagcattatcgccatcaacgcttatatgtatttaatccgtaatgtcagtccggctctcgccaccagctacgcttacgttaacccggtggtcgcggtcttgctgggtacgggactgggtggagaaacactgagcaagattgaatggctggcgctcggcgtaattgtcttcgcggtggtactggtcacgttgggaaaatatctcttcccggcaaaacccgtagttgcgccagttattcaggacgcaagtagcgagtaatcaagcgagtaaatgaatcccctgcgtgtcgatctgcgcgctggcaccttcgccgcagatccactcttccagacgctcggtaagcgcttcatccgtcagcttctcgcgcccacgtaacgcgcactcccagacaatcaatacgcgccagccgagttcctgcaagcgactgatatcgcggcgatcgcgctcaacatttttacctatcttctccagccagaactcggttcgagtcgcaggcactttaaacagatagcagtgatgatgatgccagaagcagccatgggtaaatatcacgcagcgatattcatcaacgacaaaatccggacgtccgggcagactggcgtcctgaacgcgaaatgccaggccctgcccggttaacagactggcgaggcgcttctctatcgccgtatcacgcgtggcaatcgcgcgcatatttttgctgcgagtggccttatcgtgaacgtcggccatgttgtgcctcttgctgacgcttagttatcgactacgtcggccatgttgtgcctcttgctgacgcaacgccaccgcctgtttgatttttggctcaagcagttttgccaccgcggcaaagaccggcacgaccacgctgttaccgaactggcgataggcctgagtgtcgctaaccggaatacggaatttcgcttctcccggcgcttcaaaacccattaagcgcgcgcattcccgaggcgttaaccgacgtggacgatgttgctgattcagcggatcgtcaaagtctttctcacccgtggccatatcccagccgcgatcgattaaaatttccgcgccatctttgtaataacgcgcagacagcgtacgcgtgacgctttgcggattgttcggataaaccattccataaccgaagccgttaccgcgcgcctgatgttttttcgcatatcgatagaggtacttccacagcaccggcgtcaggatatatttcgcctcgaccatcgggtccaacagctgcgccagcgtcactcgctgcgcagggaaacattcgctgatatcacgcagggtaaaatcggctttcagattcagatcgcgacgaaaacccaccagcacgatgcgttcacggtgctgcggcagaaaatgtttgccgtcgatgattttcggatcgtctggcccattatcttctgcatcagccacgtcatagcccagttcgtccagcgtctgcatgatgatgcggaacgttttaccctggtcgtgacttttcaggtttttgacgttttcgagcacaaacatcgccggacgacgcgcgtcgataatgcgtaccacatcaaaaaacagcgtgccctgggtatcgcaggcaaaaccgtgcgcccgcccgaggctgttctttttgcttacgccagccaggctaaatggctgacaagggaaaccggccagtaaaacatcgtgttcaggaatgtgttgacgaatatgttccgccgccgcctcatcactcacgccttctttatggctgagggtgatgtcgcggatatcttcattaaaatgatgcgtcgccggatcgcaataatggttggctttataagtgcgtaccgcatgtttgttccattcgctggtaaacacgcactgtccgccaatgctttcaaaaccgcgacggatgccgccaattccggcgaatagatcgataaagcgaaacgcataatgcggatgatgtgccggtggtttgggtaataacgtttgcagatgggcgaactctttctcacttaaacggtgccatgcgctgtcattcgccagcgcacgttttaaaattgccgcgctccagtgattctcacctacaccattaagctgcgccaccaacgttttaacatcataaatttgcagcagtttctccagcattgcctgtgcggcattcccggtgctgtaactatcggttacacttatattttcctgcatagatttcaccggccatctgagatggccgacaggttaacataattacagccatttagggccacgcgctcagccagcggaactaaacgcatctatcaccttgtgatcgacaccttcattctcccccgccagttcggcactgagcttcgccataaactcgactaaaaaatgcgcgttgtgctgcgccagctgcttgcctcttgcggtttgcatggtttgcggtagcttcagcaacttagtctggaaatgatccagcgcgtagcgtttatcatcaagcgggcgatgctgtgcgaacggatcttcaccatcaaacagcgccacgcccaatgccccactaacggcaaacacgcgcgccaggccaatcgcccccagggcttccagccgatccgcatcctggacaattttagcttccgttgttaagggggcgatttgcgcgctgaaactgtgagcggcaatggcatgacaaacggcctcgattttctccgccggaaattgctcgaactcttcacggagcaggcgacgcgtctcttctgccgccaggatactagaacgctgcctttgcggatgatttttcgccaggctcacaatatcgtgaaaataacaggcggttaaaatcaccagcatatcgacatcgtcatctgccgccagcttctgtgccgtagcccagacgcggcgaaaatgacacacgtcatgggccgcgtcctggtgctgatgatggtttttcaaccagttttcgaactgtgcctgccagtgttgtaagtccatacgcgctccgttgccaaagagtcgccaccttagcagtttttattcatagcgtctgctacgtgcgggacgaggtcgggtgtaccaggcaatgctgcctaacaatgccccgaccagagccataaataaaaatccgaccagtgcccctaaccactttcccgcggtagagcctaaatcgctttcaaatccgctcacgggggcatcgggaatccggctcatcacccagatgtaacgcgccattgcccagacgaaatagccacaccatgtatagaaagcccacaaagccagtttgccgccagggctgcgagagagtctctcttccatctttgtgctaccgtattccattttgagataacccggaaaattcagacttagtactattatgtgataaaagtcacatttttccacattggatgagccagtcaagactcaatcattttttgaacaaatagataaattttgcgcaacggcagtgaatacaggaaaaatcgttttgagcgattttatttatctttgatatcggctttattaattcatttaatcaatatattagcactgattacaattatacctttttattattctgtgtcatgatgcttccgttattagccttttatcgtcttgtttatattttttgggccggcatgatgccggcttttttttatgccttcattaatgtgcgcctgatcacaccagccgtttggcgcaacaatcattgataccccctatgtttccgctcaactcataacatattgatatacatttataattttcatgaatatttatatttagaattcataattatgaattatattaaatagattagaaacattttgatatcttttaaatacatttgttacatgtaatccttaaaataaaatgaacttcatagaatagtatccaaatgtgcttttttttggataacggcacttattgatatattcatgaagattataatcacaagggaatacataatgaaaagaaaagttctggcaatgctggtcccggcgttattagttgctggcgcagcaaatgcggctgaagtctataataaagatggtaataaactggatttgtacggaaaagtagtgggtctgcactacttctctgatgattctggcagcgatggcgacatgtcatatgcccgtatcggtttcaaaggtgaaactcagatcgctgatcaattcactggttatggtcagtgggaatttaacattggcgcaaacggtcctgaaagcgacaagggtaataccgcaacgcgtctggcatttgcaggtttaggctttggtcagaatggtactttcgactatggtcgtaactacggtgtcgtatatgacgtagaagcatggaccgatatgctgccagaatttggtggcgatacctatgctggcgctgacaacttcatgaacggtcgtgctaatggtgttgcaacctaccgtaacaatggcttctttggttaggtcgatggcttgaactttgctttgcaatatcagggtaataatgaaagtggtggaccattcgggcaggaaggttccggtagtggtgatggccgtagcctttccaaagaaaatggtgatggtttcggtatgtcaacatcctacgacttcgacttcggtttaagtctgggtgctgcatatcaaactctgatcgttcagatcgtcaggttggagttggtttaaatgatcgtaaccatagcaacagaaatgctggtggtgaaaccgctgaagcatggactgttggtgcaaaatatgatgctaataatgtgtatttagcagctatgtacgctgaaactcgcaatatgaccccatatggtggtggcgagtttgataatggtgaatcaagatcagccatcgctaacaaaacccaaaactttgaagttgttgctcagtatcagttcgactttggcctgcgcccgtccatcgcttacctgcaatctaaaggtaaggatttaggcggttgggctcatgacggcaacggcgacccacgttacaccaataaagatctggttaaatacgttgatattggtgcgacctactacttcaacaaaaacatgtccacctatgttgattacaaaatcaacctgctggacaacgacgatgacttctacgaagcaaacggcatcgctaccgatgatatcgttgctgtgggcttagtctaccagttctaatcagtcaactcgctgcggcgtgttactgtaaaactgaacactagcctgagttcgtccctcatcgaactcaggcttttttattggcatttcatctccatctgcggcacacgcaattgccgaagcatatcgatacagcaccttaccctgcccctcctggcacaataacatcaaccagctactcttcaagctaacacccaaatgcatttctttatgaattaatccgtaacaaacacgcttcccatatagaaatatttgcaaaaatagtgcatgaaataagctttttctctaccaatccgggatataaatattcatcagcaccacaatattccacagcactaaatctctccccgccaccccgtacctctgataatggtctaaaatcattgaagccacttgcgacgacgttgctcaataaggaaaatttggcgtgaataatattcaacaccagtgcagcatcatcattacatacttacagccgccgactaccgctttcgatatattgactcaattttccagcctggttaaaaatagcgaccagctcagtcgcaaatatagtgactaccctaactaagcaacaataaggaatacactatgactgttcaaacaagtaaaaatccgcaggtcgatattgctgaagataatgcattcttccctagtgaatatagccttagccaatataccagtcctgtctctgatcttgatggcgtggactatccaaaaccttatcgcggtaaacataaaattctggtgatcgccgcggacgaacgttatttgccgaccgataacggaaaactgttcagcaccggtaaccatccgattgaaacgttgctgccgttgtatcatctccatgctgcaggtttcgaattcgaagtggcgaccatttccggtctgatgaccaagtttgaatactgggctatgccgcacaaagatgaaaaagtaatgccattctttgagcagcataaaagcttgttccgcaatccgaagaaactcgcggatgttgttgccagcctcaacgctgatagcgaatatgcagcaatctttgttcctggtggtcatggcgcacttattggtttacctgaaagccaggacgtggctgccgctttacagtgggcaatcaaaaatgaccgttttgttatctccctttgccacggcccggcggcttttctggcgcttcgccacggcgataacccactgaatggttattccatttgcgcattcccagacgccgcagacaaacaaacgccagagattggctatatgccgggtcatctcacctggtacttcggcgaagaactgaagaaaatgggcatgaatatcattaatgacgacatcaccgggcgagtacataaggaccgtaaacttctcaccggcgacagtccttttgcagcgaatgcgttgggtaaactggcggcgcaggaaatgctggcagcttacgcgggttaatccctgttacgtttgaatgtaagcgcataatcaatcgcggccgcgttagtactcacgacgtggctgcgttttttcacggttaatttatggcgtactgaagccctatgttaatttctttgcggtaacgtaatccggaacacattatgcttattgagatagtgatacgtagcacttcccccatgcaattcggcaatcgctttgactaaagaaaggcctagtccctgacctacggaatgacggctattatctccccgccaaaatctacggaagagtttttcaggctcattaattttcgttccagggctggcgatatcaatattaagatagctgttggtatcaagaaaactggttatatgaatacggcttttttctgggctatatctaatggcattaacaataagattgcttaacattcgttgtagtaaaattttatccgcaaagatttgctgattgcactcgaccttaaagcaaatctctttctcgtcactaaggtattcaagatagtccaacaaattttcgacttccttattgagagaaaggctgtccagtttcaccaaaacattgtttttatctgccctggcaagaaacagtatgttctctgttaaccggctaatattttccagctcttcaatgtttccggcaattgttttttgatattcagcgatacttctggtttgactgagcgtaacctgattctgacccagtaatgcattaattggcgttctaagttcatgagcgagatcgtcagcaaactgacttagacgctcaaaatctttgactaaagcatgatgcattttattcaacgcctgcccaagaggttttagttctctcggtaatgcgctaacctcaacaggctctcggctatcgttataattcagcgcttccgttacaccactcaactttttgatctctcgtaatcccgttctgattaacagcggacttaatacactgcaaagtacaatggcgacaatgcaaattataatgctattaattttatactgttcaagcatgttatgtctggcactagccaatttagccacagtaaccgttaaacttgggctaacttcatcaatattaattcgtaaagcatctatctctgtatcattaataatgcttctgtaaatgccagctgcgctgattgtctcactagcaggtatgttatttaacatgccatcactgacatttgtccggttaacaattttattgatgctatcaccatgaataatcaagatatcctgactaacatccatcatccggttaaagtacacaggtaacgtatctggatttaccccatcaattaacaactgcttgatctgcgctgtccggttaatgagtgttgtatcatcgcgccatttcaactcacttgccaggccattatagagagtccagacaattccggcgccagcaacagacagtagcaatataaaaagcaaggttaaacggacggttatagatagtcttttcattatttttttaccgctacgaaactatagcccatcccccggattgtggcaattagcttttcaggaaaaggatcatcaacttttgcgcggagcctgcgaatggcgacgtccaccgtattggtatcactatcaaagttgattccccaaatttcactcgcaataaccgttctgggtataatttcgccagctctggaggccagtagccaaagtaactgaaactccttgcgcgtcagtgtaatactgatattgtccctgctcacactatgactaacagagtccattcttaagccgctgatttctaatgtactattcaaagcgtgatgttgccttaattgtgcccgaacccttgccagcaactcagaaaaactaaaaggttttaccagataatcatttgccccactgtccagccctctgactctgtcatcgacagaatcccttgcagtaaggcaaataacaggggtttgctttgctgttcttaacgtttgtaagatctgccagccatccatacccggaagcataatatccagaatgatcaatgcataatcatccttcagcgcaagataaagcccatctctgccatcagaaacggcatcgatgacataacccgcttcggaaagcccctgcgttacccattcctgggtcctttgattatcttcaataagtagaatcttcatgaaaataatatgccataaatcatatgttatagaaacagcctggttcattacaaaattgtaatgctgctgtaaggttaccctggacgctttttcgctatcctcaaaactcattcacatgacaaggatataaacatgttaaagcgttatttagtactcagcgtagcaacggcagcatttagtttaccttctttggttaatgccgcacaacaaaacattcttagcgtgcacattttgaaccagcaaacaggaaaacccgctgctgacgtgacagtcactcttgaaaagaaggcggataacggctggttacaacttaataccgccaaaacagataaggatggacgaattaaggcactgtggcccgagcaaactgcaactacgggcgattaccgtgtcgtatttaaaaccggggactatttcaagaaacaaaatcttgaaagtttcttccctgagatccccgttgaatttcatattaataaagtgaacgagcattatcatgtgcctttattacttagccaatatgggtatagtacctatcgtggcagttaatgcataaatatgtaaaagcagatctctgctactgttagggaggacactccctgacagattaacagtaaacggctcttgctggctaacgacaaaaaagtgtgatggcttatgaaaaagaatcaatttttaaaagaaagtgatgttacggccgagagcgtattctttatgaagcgtcggcaggtgttaaaagcactgggcatcagtgcaactgcactttctttgcctcacgctgcgcatgccgatctgcttagctggtttaaagggaacgatcgcccgcccgcccccgccggaaaagcgctggagttcagcaagcctgccgcctggcaaaataacctgccactgacgccagcagataaagtttccggttataataacttctatgaattcgggctggataaagccgatcccgccgctaatgctggtagcctgaaaaccgatccatggacactgaaaatcagcggcgaagtggcaaaaccattgaccctcgatcatgatgacttaacccgtcgcttcccgctggaagagcgtatttatcgtatgcgctgcgtggaagcgtggagcatggtggtgccgtggattggttttccgctgcacaaattgctggcgcttgccgaacctaccagcaatgcgaagtatgtcgctttcgaaacaatttatgcaccggaacagatgccaggccagcaggaccgctttatcggcggtgggctgaaatatccttatgtcgaaggattgcgtctcgacgaagcaatgcatccgctcacactgatgaccgtaggtgtttatggcaaggcgttaccgccacaaaatggcgcgccggtgcgactgattgtgccgtggaaatatggctttaaagggattaaaagcatagtcagtattaagctgacccgcgagcgtccgccaaccacctggaatctggcagcgcctgacgaatacggtttttacgccaacgttaatccgtatgttgatcacccgcgctggagtcaggctaccgaacgatttattggtagtggcggcatcctcgatgtacagcgccagccaacgctactgtttaatggttacgccgcccaggtggcaagcctgtatcgtggcctggatttgcgggagaatttctaaatgcgtctgacagcaaaacaggtgacatggctgaaagtttgcctgcatcttgccggattgttgccgtttctctggctggtctgggcgatcaatcacggtggactgggtgccgatccggtgaaagatattcagcattttactggtcgcactgcactgaaatttttgctggcgaccttgttaatcacccctctggcacgctacgcaaaacagccgttattgatacgcactcgccgcctgttaggattatggtgctttgcctgggcgacactgcatttaacaagttacgcattgctggagctgggcgtgaataatctggcgttattaggtaaggagttaattacccggccttatttaacgttaggtattatcagctgggtaattttgcttgctttagcgttcactagtacccaggcgatgcagcgaaaactcggcaagcactggcaacagttgcataatttcgtctatcttgtcgcgattctggccccaatacattatctgtggtccgtgaagattattagtccgcagccgctcatctacgctgggctggctgtactgcttttagccttacggtataagaagttgcgttccctttttaaccggttacgcaagcaggttcacaacaaattatctgtataacttcatattgccgacaaagtacgcgttatccctgccggatgtggcgcgagcgccctatccggcatacacagatcgcatcaggttatgtttcgtttgtcatcaacctcaaatcaccaaaataatttattttatttcaataagatagataagtagaactgagaaagccatgctctcgtttcctaagagttgttgcattttgctatatgttacaatataacattacacatcatatacattaactctggaggaaactgttttggcgattcgtctttacaaactggctgttgctttaggtgtctttattgttagcgctcctgcctttagccatggtcatcacagtcacggcaaacccttaacagaggtcgaacaaaaagctgctaatggtgtttttgatgatgccaatgtacaaaaccgaacgctcagtgactgggatggagtctggcaatccgtttatcctttactgcaaagtggcaaacttgaccccgtctttcagaagaaagcggatgcagataaaactaaaacatttgctgaaattaaagattattatcacaaaggttatgcaacagatatcgagatgattggcattgaggacggcattgttgaattccatagaaataatgaaacaacaagctgtaaatatgattacgatggatacaaaatactcacctataaaagtggcaagaaaggcgttcgttacttattcgaatgtaaagatcctgaaagcaaagcccctaaatatatacaatttagcgatcatataattgcaccacgaaaaagttctcattttcacatttttatgggtaatgatagtcagcaatctttattaaatgaaatggaaaactggccaacgtattatccatatcagttgagtagcgaagaagtggtcgaggaaatgatgtctcattgagtattctcatgataacgcctcgatgccgctttagtaagttatcataactgccactggtccatccacaaacgccactgaacgcaagctagctacagacacgctcatcactatgacgtgtctgtatattaataagctaacccgcattgagttaaccaataacggattccatacacaatacggccaacagagaaagatacctgtgctcacgccattgcttatattggctggttacaatatgcactatcaattttttaaataacaaattattaaaaccacatctgtataaggaatttttaaggttcgtgggatagcttgactgtgaaaatcacaggagctacaaaaatgaaccgattcagtaaaactcaaatttatttacattggataacgctgcttttcgttgcaataacctatgccgcgatggaactccgtggctggtttcctaaaggtagtagtacttatctgctgatgcgagaaacacattacaatgcgggtatattcgtttgggtgttaatgtttagtcgcctgattataaaacaccgttatagtgatccttctattgtgccaccgccacctgcctggcaaatgaaagcggctagcctaatgcacatcatgctttatataaccttccttgcacttcctctgctggggattgctttgatggcttacagtggaaaaagctggagtttccttggtttcaatgtgtctccctttgttaccccaaacagcgaaattaaagcactgataaaaaatattcacgaaacctgggcaaatataggctactttttaatcgcagctcacgctggcgcagcactctttcatcactacattcagaaagataatactctgttacgaatgatgcctcgccgcaaataagtcgatccccttacaaggaaatgtgaaccatggacatcaacgcgtcataaatgtttacgcaagtgcacaatgcaccctttccactatcaacaaggaggagcagaaactgtgtaaatcgtacaatggtaagacttatcaaaaatacaggttaattttggtatttaaaccttttttacttgttagtatgatacaaaggctttcaaaaaagctgcgaaattcaacaactcttggaaattatggactttgtcccgcggctttaatctgacggccgcgttccttttttgactcaattattgaacccttctctacgcaacttcagttcccaccaccaactttgcggcagtttcataggatgaatgtctaaaagaataatggtgagcgataagaaaacgactgaataactgcacattttcgctcgaaagcttcctgtcagatccatagcgaatcaagtgctgaatgtcacagtatcgaacagaaaacagtgacgatctaacccttcaagaatattctacgattgttctgtttaggaaaagcaaggcgggaagtcgggagataagtcattgataaaggttcagatggttgccatgatgccaggaaatttggcattttaacagtccctgtccgtgcaattttgttcaagtgacgagtttgcgagcaaaacgatgattaagtggccctggaaagtacaagaaagtgcacatcaaactgcccttccctggcaggaagcactaagcatcccccttttaacgtgtctgacggaacaggaacaaagcaaattagtcactcttgccgaacgttttttacagcaaaagcggcttgttcctttacagggctttgaactggatagtttaagaagctgccggatagcacttctattttgcctacccgttctggagttaggactggaatggctggatggttttcatgaagtcttaatttatcctgcgccatttgtggtcgatgatgaatgggaagacgatatcggtctggtgcataaccaacgtattgttcagagtggtcagagctggcagcaagggcctatcgttttgaactggttggatatacaagattcttttgatgcttctggttttaacctgattattcatgaagtcgctcataagctggacacccgtaacggcgatcgcgccagcggagttccctttattccgttgcgtgaggttgctggctgggaacacgatcttcatgctgcaatgaacaacattcaggaagaaatcgaattggttggcgagaatgcggcgagcattgatgcttatgcagccagcgatcctgctgaatgttttgccgtactttctgaatatttctttagcgccccagaactttttgctcctcgtttccctagtttgtggcaacgtttctgccaattttatcaacaagatcctttgcagagactgcatcacgctaatgatacagacagctttagcgcgacgaatgttcattaattaacaactttgcagattaattaaccaattgaaatgacttatgaaatttagtgttgacagacaaggtaccgctaagtaatattcgccccgttcacacgattcctctgtagttcagtcggtagaacggcggactgttaatccgtatgtcactggttcgagtccagtcagaggagccaaattctaaaaattcgcttttttagcgcaatgtcactgaccttagttgaacattgttttttaacggatagcgggtttttaacatcttaagcgccctcgacctttatggttgagggcgttttgctatgaacgccatcaccattttcccctcgattataaaacttgagttattcagtagtctcccctcttgcaactcacacccaaaactgcctaacgaaaagttattaattttcaatcatattgctatcagtatttacattttttcgctgtgctagaaagggcgcatttatgttagctcgtagtgggaaggtaagcatggctacgaagaagagaagtggagaagaaataaatgaccgacaaatattatgcgggatgggaattaaactacgccgcttaactgcgggtatctgtctgataactcaacttgcgttccctatggctgcggcagcacaaggtgtggtaaacgccgcaacccaacaaccagttcctgcacaaattgccattgcaaatgccaatacggtgccctacacccttggagcgttggaaagcgcccaaagcgttgccgaacgtttcggtattagcgtggctgagttacgcaaactcaaccagtttcgtacgtttgctcgaggttttgataatgtccgccagggtgatgaactggatgtcccggcacaagttagtgaaaaaaaattaaccccgccgccgggtaatagcagtgacaacctcgagcaacagatagccagtactagtcagcaaatcgggtctctgctcgccgaagatatgaacagcgagcaagcggcaaatatggcgcgtggatgggcctcttctcaggctagtggcgcaatgacagactggttaagccgcttcggtaccgcaagaatcacgctgggcgtggatgaagattttagcctgaagaactcccagttcgattttctccatccgtggtatgaaacgcctgataatctctttttcagtcagcatactctccatcgtactgacgagcgtacgcagattaacaacggcttaggttggcgtcatttcactcccacatggatgagcggcatcaacttctttttcgaccacgatcttagccgttaccactcccgcgccggcattggcgcggagtactggcgcgactatctaaaattaagcagtaacggctatttgcgactgaccaactggcgcagcgcacctgaactggacaacgattatgaagcacgcccggccaatggctgggatgtacgcgcagaaagctggctacccgcctggccgcaccttggcggtaaactggtctatgaacagtattatggcgatgaagtggccctgttcgataaagacgatcggcaaagtaatcctcatgccataaccgctggacttaactatacccccttcccgctgatgaccttcagcgcggagcaacgccagggtaaacagggcgaaaatgacacccgttttgccgtcgattttacctggcaacctggcagcgcaatgcagaaacagcttgacccgaatgaagtcgctgcacggcgtagccttgcaggcagccgttatgatctggtggatcgcaacaacaatatcgttctggaatatcgcaaaaaagaactggttcgcctgaccctgacagaccccgtgacagggaagagtggagaagtgaaaagtctggttagcagcctacaaaccaaatatgccctgaaaggctataacgtcgaagccaccgcactggaagctgccggtggcaaagtggtcacaacgggtaaagatattctggttaccctgccggcttaccggttcaccagtacgccagaaaccgataacacctggccgattgaagtcaccgccgaagatgtcaaaggcaatttgagcaatcgtgaacagagcatggtggtcgttcaggcacctacgctaagccagaaagattccagcgtaagcttaagtacccaaacattgaacgcggattcccatagtaccgccacactgacttttattgcgcatgatgcagcaggtaatcctgttgtcgggctggtgctcagcacgcgtcacgaaggtgttcaggacatcaccctttctgactggaaagataatggtgacggaagctatacccagatcctgaccacaggagcgatgtctggcacgctgacgctgatgccacagctgaatggtgtggatgcggctaaagcccccgccgtggtgaatatcatttctgttagcagttcccgaactcacagcagtattaagattgataaggaccgttatctctccggcaatcctatcgaggtgacggtagaactgagagatgaaaatgacaaacctgttaaggaacaaaaacagcaactgaataacgcagtcagcatcgacaacgtgaaaccaggagtcactacagactggaaagaaaccgcagatggcgtctataaggcgacctataccgcctataccaaaggcagtggacttactgcgaagctattaatgcaaaactggaatgaagatttgcataccgctggatttatcatcgacgccaacccgcagagtgcgaaaattgcgacattatctgccagcaataatggtgtgctcgccaatgagaatgcagcaaacaccgtcagcgtcaatgtcgctgatgaaggaagcaacccaatcaatgatcataccgtcacgtttgcggtattaagcggaagcgcaacttccttcaacaatcaaaacaccgcaaaaacggatgttaatggtctggcgacttttgatctgaaaagtagtaagcaggaagacaacacggttgaagtcacccttgaaaatggcgtgaaacaaacgttaatcgtcagttttgtcggcgacagcagtactgcgcaggttgatctgcagaagagcaaaaatgaagtggttgctgacggcaatgacagcgtcacaatgaccgcgaccgtccgggatgcaaaaggcaacctgctcaatgacgtcatggtcactttcaatgttaatagtgcagaggcgaaactgagccaaaccgaagtgaatagccacgacgggatcgccacagctacgctgaccagtttgaaaaatggtgattatagggttacggcctctgtgagctctggttcccaggctaatcaacaggtgaattttatcggtgatcaaagtactgctgccctgaccctcagtgtgcctagtggtgatatcaccgtcaccaacacagctccgcaatatatgactgcaaccttgcaggataaaaatggcaacccactaaaagataaagaaatcaccttctctgtgccaaacgacgtcgcaagtaagttcagcattagcaacggaggaaaaggcatgacggatagtaacggggttgcaatcgcctccctgaccggcacgttagcgggcacgcatatgatcatggctcgtctggctaacagcaatgtcagcgatgcacagccaatgacgtttgtggcggataaagacagagcggttgtcgttttgcaaacaagcaaagcggaaatcattgggaatggcgtggatgagacaactctgacagcaacagtgaaagatccgagcaatcatccggtggcggggataacggtaaacttcaccatgccacaggacgttgcggcaaactttacccttgaaaataacggtattgccatcactcaggccaatggggaagcgcatgtcacgctgaaaggtaaaaaagcgggcacgcatacggttaccgcaacgctgggtaataacaataccagtgatagccagccggtaacatttgtggcggacaaagccagcgctcaggttgtcctgcagataagtaaagatgagatcacaggtaatggcgtcgatagcgcaacgctaactgcaacggttaaagatcagttcgacaatgaggtgaataatcttccggtaacattcagcagtgcctctagtggactcaccctgaccccgggagtaagtaataccaacgagtctggcatcgcgcaggccactctcgcaggcgttgcctttggtgagaagacggttactgcaagtctggctaataatggtgccagcgacaacaaaactgtgcattttattggcgacacagcggcggcaaaaattatcgagttggcgcctgtcccagacagcataatcgccggtaccccgcagaacagctccggcagcgtcatcaccgccacagtcgttgataataatggctttccggtgaaaggtgtgactgtgaacttcaccagcaacgcagcgacagccgaaatgacgaacggcggtcaagccgtgacgaacgaacagggtaaggctaccgtcacttataccaatacccgctccagcatagaaagtggagcgagaccggataccgttgaggccagtctggaaaatggtagctccacgcttagcacaagtattaatgtcaacgctgatgcgtctacggcacatctcaccttgctacaggcactttttgatacagtctccgcaggcgagacaaccagtctgtatattgaggtgaaggataattacggcaacggtgtcccccagcaggaggtaaccctcagcgttagtccaagtgaaggcgtgacccccagtaataacgctatatatactaccaaccacgacggcaatttttacgcaagctttaccgctacaaaagccggggtttatcaattgacggcaaccctcgaaaatggcgatagcatgcaacaaacagtgacctatgtgccgaacgtcgcgaatgctgaaatcacgctggcagccagcaaggatccggtgattgccgacaataacgatctcacgacactaacagcaacagtcgctgatacagagggcaatgcgatagccaacactgaggtaacatttactctgccggaagatgtgaaggcgaacttcacgctgagcgatggcggtaaagtgattactgatgctgaaggcaaagcgaaagtcacgctgaaaggtacaaaagcaggcgctcatactgttacagcaagcatgactggcggtaagagtgagcagttggtggtgaactttattgcggatacgctcactgcgcaggttaatcttaacgttaccgaggacaattttatcgctaataacgtcgggatgaccaggctgcaggcaacagtgactgatggaaacggcaacccgttagccaatgaggcggtgacattcacgctaccggcagatgtgagcgcaagctttactctcggacaaggcggttccgccattactgatatcaacggcaaggctgaagttacactgagcggtacaaaatccggcacctaccccgtgacagttagcgtgaacaattatggtgtcagtgatacgaaacaggtgactttgattgccgatgctggtaccgcaaaactagcctccttaacctctgtatacagtttcgtcgtcagcacgaccgagggcgcaaccatgacggcaagcgtcactgacgctaacggcaacccggtagaaggcataaaagttaatttccgcggaacctccgtcacgctaagcagcaccagcgttgaaacggatgatcggggtttcgctgaaattcttgtgacaagcaccgaggtcggactgaaaacagttagtgcctctctggcagataaacctactgaagtcatcagccgattactgaatgccagtgcagatgttaattctgcgacgattaccagtctggagataccggaaggtcaggtaatggtcgcacaagacgtagcagttaaagctcacgttaacgaccagtttggcaacccggttgcgcatcaacccgtgacattcagtgcagagccatccagccaaatgatcatcagccagaatacggtctctactaatacgcagggtgtagccgaggtcaccatgacgcccgaaagaaacggtagctatatggtgaaagcatccctgccgaatggagccagtcttgagaaacaactggaggctattgatgaaaaactgacactcacggcgtccagtccgcttatcggtgtctatgcccctacaggcgctactctgacggcaacgctaacctctgcaaatggcactccagtggagggtcaggtcatcaactttagcgtaacgccagaaggggcgacgttaagtggcggaaaagtgagaactaactctagtggtcaggctccagtcgttttgaccagcaataaagtcggtacatatacggtgactgcatctttccataacggcgtaacaatacagacacagacaaccgtgaaagtcactggcaacagtagcaccgcccatgttgctagctttatcgctgatccaagcactatcgccgccaccaacactgatttaagtaccttaaaggcaacggttgaggatggcagtggtaacctgatcgaaggtctcactgtgtacttcgccttaaaaagcggctctgccacattaacgagtttaacagcggtgaccgatcaaaacggaatcgcgacaacaagcgtgaaaggagcgatgacaggtagcgtcacggtaagcgcagtcacgaccgctggtggaatgcaaacagtagatataacgctggtggctggcccggcagacaccagccagtccgtccttaagagcaatcggagtagtctgaaaggggactataccgatagtgctgaattacgtcttgttctgcacgatataagtggcaatccgatcaaagtttctgaagggatggaatttgtgcaaagtggtactaacgtgccctatataaaaattagcgcaattgattacagtctaaatatcaacggtgattacaaagccactgttacaggaggcggagagggtatcgcaacgctgatccctgtattgaatggtgttcatcaagctggtctgagtaccacaatacaattcactcgcgcagaagacaaaataatgagcggtacagtaagtgtcaatggtactgacctaccgacaactacattccctagccaggggttcaccggggcgtattatcagttgaataatgacaactttgccccaggaaaaacggcggctgattatgagtttagtagctctgcctcctgggtcgatgttgatgctaccggtaaagtgacatttaaaaatgtcggcagcaatagcgaaaggattacggcgacgccaaaaagtggaggccctagctatgtatacgaaatccgtgtgaagagttggtgggtgaacgccggcgaggctttcatgatatacagccttgctgaaaatttttgcagcagcaatggctacacgctccccagagcaaactatttaaaccactgtagttcccgaggcatcgggagtctgtacagtgaatggggagatatggggcattacacgactgacgctggttttcaaagtaatatgtattggagttctagtcccgcaaacagtagcgaacaatacgtagtttccctggcaacaggtgatcaaagcgtatttgaaaagcttgggtttgcttatgcgacatgttataaaaacctgtgattttccgttataatttcttaaagagtgttccattcggggcactcttttttacattccctctacagaactagcccttctctcacagaaaatgaataaataaaaatgcggcaccgccagaatcgcgttcgatgtgactatgatcattttcggtgagtactgctttgatctaaaggctggttttctgtgatgattgaccagcctcagagtattgatgacaccaccgttcataacagatcggcattactatgcataagtactgtctcatattctcgccaaaacactttttaatgcctttgcgaattcatccagacttatattgtcaattttttgcccaacgacgactgactccgagacatcggccattgcgggccatcgcgttttgtaatcagcataaattgcaacaacaggggtattataggcacttgccatatgtaatattgaggtgtcaggagttattgcgatataagcatcttttatgattgctgctgaacgtttaatcgagggtggtaaggataaacggtagacattattataacaatccactaatgccctggctttatcttcacctttgggtccatgaacgatcactattggtatatctgtttcactttaaatttttgctattagattttctgcaatcgataatgaaaatgtacgttcctgcgagctaccttctaaattgaacgcaatgtaagatcctaacgatcgcatttcctcgcgcacctcatcgagtacatcctcacttagtggcaattcatatattggcctgactgctggaaaacccgcctcacgcatcataaatgcccatgtcataggtacgggagcccggagtttctgatccatactggacgcgttcttgcacaaaggggagaagcaattcatggttataccaacaacctgaaaattcgtttttgctttcaactgactgataaataacatcgttttcaggttctttttacgcatcccctcaatgcaaagatccggcgtaccgtattgctgtgttatgttctttgctaaatcttttatttcttttaatgttgcgtgatcctgcatagtcattgtgactaatgttaatttagtctgttcaagtttaagcgcattaaagacttctaaattaattgtcgacgttacaattaaaagatgcttaattttatgcaattcaagcgcccgaataacaggaaagatggccatagcatcgccaatctgatcgggaatatggatgacaacaaagtctgttttttcaatattgaaattataagctttataatcgtagtaactaaatgcaatacgtctcaacaatgatgctaaaaacatacctaacctcgcctccctactggttataatgcaatgcagtctatcagactcatcagggtgccattttgtgcatatgcggacttttatgtttcatatctctaacctgtgggtcctctgcttaatccttaaacaacaccagcaactcctgcgctttcatcttccatcgaatttttcatgttgccgctaatcagccataaaatcatttgcagatgcgctctgtcgaggtagtctcataaggttcgtttatagatcgacggcaatgtgagttaccttttccatactaattataaaaagacagtacaaacaggatcattatggactccacgctcatctccactcgtcccgatgaagggacgcttagcttaagtcgcgcccgacgagctgcgttaggcagcttcgctggtgccgtcgtcgactggtatgattttttactctatggcatcaccgccgcactggtgtttaatcgcgagtttttcccgcaagtaagcccggcgatgggaacgctcgccgcatttgctacctttggcgtcggatttcttttccgtccgctcggcggtgtcattttcggtcactttggcgaccgactgggacgtaagcgcatgttaatgctgaccgtctggatgatgggcatcgcgacagccttgattggtattcttcctagtttcagcaccattgggtggtgggcacctattttgctggtgacactgcgtgccattcagggatttgcagtcggcggcgaatggggaggcgcggcgttgctttccgttgaaagtgcaccgaaaaataaaaaagccttttacagtagcggtgtacaagttggctacggtgtaggtttactgcttagtaccggactggttagtttgatcagtatgatgacgactgacgaacagtttttaagctggggctggcgcattcctttcctgtttagcatcgtactggtactgggagcattgtgggtgcgcaatggcatggaggagtccgcggaatttgaacaacagcaacattatcaagctgccgcgaaaaaacgcatcccggttatcgaagcgctgttacgacatcccggtgctttcctgaagattattgcgctacgactgtgcgaattgctgacgatgtacatcgttactgcctttgcacttaattatagtacccagaatatggggctaccgcgcgaacttttccttaatattggtttgctggtaggtggattaagctgcctgacaattccctgttttgcctggcttgccgatcgttttggtcgccgtagggtttatatcacaggtacgttaatcggaacgttgagcgcatttcctttctttatggcgcttgaagcacaatctattttctggatagttttcttctccataatgctggcaaacattgcgcatgacatggtggtgtgtgtgcaacaaccgatgtttaccgaaatgtttggtgccagttatcgctatagtggcgctggagtcggttatcaggttgccagtgtggttggcggtggatttacaccttttattgccgctgcactcatcacttactttgccgggaactggcatagcgtcgccatttatttgctggctggatgcctgatttccgcaatgaccgctttgttgatgaaagacagtcaacgcgcttgatagcctggcgaagatcatccgatcttcgccttacacttttgtttcacatttctgtgacatactatcggatgtgcggtaattgtatggaacaggagacacacatgaataataagggctccggtctgaccccagctcaggcactggataaactcgacgcgctgtatgagcaatctgtagtcgcattacgcaacgccattggcaactatattacaagtggcgaattacctgatgaaaacgcccgcaaacaaggtctttttgtctatccaagtctgaccgtaacctgggacggtagcacaaccaatccccccaaaacgcgcgcatttggtcgctttacccacgcaggcagctacaccaccacgattactcgccctactctctttcgtagctatcttaatgaacaacttacgttgctgtatcaggattatggtgcgcatatcagtgtgcaacccagccagcatgaaatcccttatccttatgtcatcgatggctctgaattgacacttgatcgcagtatgagcgctgggttaactcgctacttcccgacaacagaactggcgcaaattggcgatgaaactgcagacggcatttatcatccaactgaattctccccgctaagccattttgatgcgcgccgcgtcgatttttccctcgcacggttgcgccattataccggtacgccagttgaacattttcagccgttcgtcttgtttaccaactacacacgttatgtggatgaattcgttcgttggggatgcagccagatcctcgatcctgatagtccctacattgccctttcttgtgctggcgggaactggatcaccgccgaaaccgaagcgccagaagaagccatttccgaccttgcatggaaaaaacatcagatgccagcatggcatttaattaccgccgatggtcagggtattactctggtgaatattggcgtgggaccgagtaatgctaaaaccatctgcgatcatctggcagtgctacgcccggatgtctggttgatgattggtcactgtggcggattacgtgaaagtcaggccattggcgattatgtacttgcacacgcttatttacgcgatgaccacgttcttgatgcggttctgccgcccgatattcctattccgagcattgctgaagtgcaacgtgcgctttatgacgccaccaagctggtgagcggcaggcccggtgaggaagtcaaacagcggctacgtactggtactgtggtaaccacagatgacaggaactgggaattacgttacagtgcttctgcacttcgttttaacttaagccgggccgtagcaattgatatggaaagtgcaaccattgccgcgcaaggatatcgtttccgcgtgccatacgggacactactgtgtgttagtgataaaccgttgcatggcgagattaaacttcccggccaggctaaccgtttttatgaaggcgctatttccgaacatctgcaaattggcattcgggcgatcgatttgctgcgcgcagaaggcgaccgactgcatagccgtaaattacgaacctttaatgagccgccgttccgataataagttctgaaccttcttatcagaaatagatgtgaaggagtaagtaagacacctggcaaatagcctgcaataatcgtgggctgtttgcttccttgggcggatacgagttttattatcgtcttaatgatttccacatattaaaagcaagtatgctttcaaaacacaattataaaaaatcccgccaacaatataagtttttataaaattaaatataagattatggctttagaatatttttatttctaatagacgagatttttcctgttatgatataatatgctgaattaacacatgttaacgatttaccagtaatgtaaataaattttcgaggagatcattccagtgggacgtaaatgggccaatattgttgctaaaaaaacggctaaagacggtgcaacgtctaaaatttatgcaaaattcggtgtagaaatctatgctgctgctaaacaaggtgaacccgatccagaattaaacacatctttaaaattcgttattgaacgtgcaaagcaggcacaagttccaaagcacgttattgataaagcaattgataaagccaaaggcggcggagatgaaacgttcgtgcagggacgttatgaaggctttggtcctaatggcagtatgattatcgccgagacattgactagtaatgttaaccgtacgattgctaacgttcgcacaattttcaataaaaaaggcggcaatatcggagcggcaggttctgtcagctatatgtttgacaatacgggtgtgattgtatttaaagggacagaccctgaccatatttttgaaattttacttgaagctgaagttgatgttcgtgatgtgactgaagaagaaggtaacattgttatttatactgaacctactgaccttcataaaggaatcgcggctctaaaagcagctggaatcactgagttcagtacaacagaattagaaatgattgctcaatctgaagttgagctttccccagaagatttagaaatctttgaagggcttgttgatgcccttgaagatgacgacgatgtacaaaaagtttatcataacgtcgcaaatctctaattatcttttaaagaaatctgtctttacggcagatttctttaatctcatataattcttataaaaaatataatattcaactcgtcatattgattatacccccccgttcccagagaaataatatttattaaaattccagttcttctttttctgattacagaaggcaaagtggcaattacgcatagtttcccgataaagacgcgatagcgacatcccgcataaggcatttttctctttatctttgtacggtacttcatggaacagagtttttgaccttgcgaatcgtgatgtctgttggggagggacaatttgctcactgaagcgtgagactcgattaagcgcacgaaacacagaaatcaaaaaacccggtcacttttttacaaggtaaccgggtaaaaataatttttattttttaactgttttgagactcatagagatgtctcaaaactaaaatttggctcctctgactggactcgaaccagtgacatacggattaacagtccgccgttctaccgactgaactacagaggaatcgtgagaacgaggcgaatattagcgatgcccacccacaatgtcaaagcctgttttttaaatttgaaatcgtttgctgaaataatctgcattttgtcgtttattcgctcacaactggctttttttcacacttttgcggctcgggtcgagggtatttccatagccaacgtccagtaaccattcgccagtaaaacagcacggcccgcacagcccagtcggcaaacattcccatccagacaccaaccacaccccagccaagcatgattcccagcacataaccgactacaacccgacaaccccacatgctcaacatgctaacccacatggcgtaacgggcatcacgagcacctttaaatccagcgggtagcacccaactggcggaccaaataggcataaataaagcatttagccaaatcagaatcacaacgacatgtttaacctgtggatcctgggtgtaaaagcttgccataaccccggcaaagggagccgttagccaggcgatggccgttaatccaagagtggaaagccagaacacatgccgcaactgaatctctgcttgcgctatctgccctacccccaaccttcggcctgtaatgatcgtagaagcagagccgagcgcacttccgggtaagttgataagagccgcaatactaaacgcgataaaatttccggcaataacactggtccccatcccggcaacgaacatttgggttaataaccgaccactggtaaataacacactttcgacactcgcgggaataccaatccccatgacttcccagataatgctaaaattcagcggtttaaaatagctctttaagctaatccttagcgcaggattaaaaccaatcgccagcacccacaaaattgcaactgcgccaatataacgagaaatggttaaacccagccctgccccgacaaatcccagtcccggccaggagaaaaggccgtaaatcaatatgccgctaataataatattaagaatattcaggctaccgttaatcaatagcggtattttcgtattccctgcaccacgaagtgccccgctaccaataagagtgatggcagctgctggataactgagtaccgtcagctccagataagtcaacgccagtgctttaacttctgtcgtggcatcacccgcgacgaaatcaataatttgttcgccaaaatgatgaataagcgttgccaacagtacggcaaacaacgtcatgatcaccaaactctgccgcgtcgccaccctcgctcgtcgtcgatcccgcttaccgagactaaatgccacaacgacagtagtaccaagatcgatagcagcaaaaaaagccataatgaccatattgaagctgtccgccaatcccacgccggccatcgcatcttttcccagccagctgaccagaaaagtgctcagaacccccatcaacaggacacaggcattctccatgaagataggaacagcaagcggggttatctcgcgccagaacaacactttgtagctcttgcgtttagcgtgccagcgagtgccgtgaacaacctggcgtaaagcagaggagatattcaaagcgctccttaattgcagaaagtgaaaccacatttcaaataaactgggagaatcagcaaagctgcaaagattttcgccaacaaattgtctgcaaatgcaacaaactgtacttagaaacggcaaacagttggggaatttaaaaatcgggttactcaaaagatttttcgccgttaagatgtgcctcaacaacgattcctctgtagttcagtcggtagaacggcggactgttaatccgtatgtcactggttcgagtccagtcagaggagccaaattcctgaaaagcccgcttttatagcgggatttttgttatatctgataatcaatttcctcttcactgctttccatcacctgccgcttgatatcctcaacactcagtcctgcattacaaagttccagaaagcgccagacatagttacgctgaagttgtcctcgcttcagtcccaaccagacagtattagcatcaaaaagatgccgcgtatccaggcggattaaattctcttcctcttgttcgccactggattgctcggcaactaatccgatcccaagcccaagagcaacataggttttaatgacatcagaatcctgcgcacttaatacaatatctgccagcaaacctttgcgggcaaatgcgtcatcaatacgactgcgccccgtaatcccctgtcggtaagtgattaacggccacttcgctatactttccagcgtcaatggactaatttgcgtcaagggatgatcgtgtggaacaagcaaactatggtgccaacgaaaccacgggaaggcgacgagctgcgggtcattactcaaacgctcgctggcgataccaatatcagcttcgccattttgcaacaatgtcgcaatttcctgtggcgtcccctggattagctcgagccgaacctccgggaaaagttcgcgaaaagctttaatgacctctggcaagctataacgtgcctgagtatgcgtcgttgcaatagtgagaacgccagacgtatcgttggtaaacaggtctgcaagccgacgaacattactggcttcattcagaatacgttctgcaatgaccagtaatgctttgcccggttcagtcatgcccagcagtcgcttacctcgtcgaacaaatatttcgatgccaagttcatcctccagttcccgaatatgacggctgacgccactctgactggtaaaaagcatattcgcaacctctgtcaggttgtaatcctgacgtgcagcctcgcggattatctttagttgttggaaattcacggtaaactccgggcagttcagatttcccgttattgttaaagtctaatgcccggcataacaaataataaaaacccgcatcttattccatcccgatataacacttagctcaccaattgccactgccttttttccatcactggagaactaatcacactcattaacaactctttcactgcctgtgcctgtgggcttaagttcgctctggcgggtaaatttaaactcaaagagagactcatggaaggagtggtaatgcgactcatccacccatttactgcgccacataagctacgcgcggcgctttcgggtaatactgcaacgcccatgccgctggcaatcgctgcggtaagcgtggcaatagactcaatttcaccaataacttttgccgtgagtcgccgtagggaaaaagcctcatcaacacgaagtctaatagcactgtaatcactggggagaaagaggttcatttgcgcaatagcattcacatcaacgctttgccccgggcaatcttgagttcctaccagaaaaagatcttctttcagcaaagcctgactggatacaccagccacaggggaatgctcataaatcaccgccatatcgagttggtgatttatcaatttttcgttaagcactgcaccactattttcatgaagatagataacgatctccggaaattcagcgcgaaccgcctgtaataagggcatggtgatggaactcgcagcggttcctggtgcaaagccaatgctgacttgcccgcttaatgcctgaccaacgttatgcaccgccagttgggcctgttcacactgacgtaaaatggcccgcgcatgggtatagagaatttttccggcgtctgttggtgtaacgccccgctttgtacggatcaaaagttgttgatttaactcaccttccagtgtggcaacctgctggctgagcgctggttgtgcgatatgcaatacttcagcagcctgggtcaggctaccaatatctacaatttttacgaagtatttcaggcgtctgaagttcatgttgcctccggtttttaagaatcggcccaagtgccgccattacttacaaccagattgcaagatgcttgccagttttattttggtgttgatgtacaagctaaccaactgtcaaataagagattatgatagattcgtcatttgctcctttaatcagctgtcgcgttcccctgccctataaaaggagggtatgcaccacgatggttcattacccaataagattgaaagctcaccactttgttgaaattgacagcaaacaaacaaaaaaatgcatttcaccctttgacatcaccatgcactgccattaatatgcgccccgttcacacgattcctctgtagttcagtcggtagaacggcggactgttaatccgtatgtcactggttcgagtccagtcagaggagccaaattcaaaaaagcctgctttctagcaggctttttgctttctaattaccaacgctcttaaaacatctgtctactaccagaactaatttgcacaggcattccgcttcgacgttgcaacgcagcatttgcgcgatttacatcaacttcttgcccgttgataaacgcccgcaaagatggggttaccggcaatggcacttttcggtcagactcatattctgcacgattgcggctcaatggctcatgaacttccagccagttgctgccatctggttcagtggtgtattttactggctggtcgataatttgcacacgcgtcccaacaggaacattatcaaacagatatttgatatcgtcattgcgcagacgaatacagccctgacttacccggagcccaataccaaaattggcattggtaccatggatggcatacaacctgccaatataaatcgcgtacagccccatgggattatcggggcccgcaggaacaaatgcgggcaaactctcccctcgtttcgcatattcgcgccgagtgttcggcgttggcgtccaggttggagcttcttgtttacgttcaacggtagtcacccagttacgcggggtttctcgcccagcctggccgataccaataggaaagacttccacagtattactgtctggtgggtagtaataaagacgcatctcagcgacgttaacaacaatccctttacgaacagtgtcgggcaaaatcagttgctgcggaatggtgagttggctgccagacttcggcaaaaaaacatcagcgcccgggttcgcttccagcatgttacttaacccttgcccgtattgtgcggcaaaagtctccagcggctgggtattgtgatcaggaacagttacagtaaagctctgccccactaaacggctaccctctggaggtaatggataagttaccgccaggctagtatggctggcaaaaagcagagcaaaactgcaaagaatatttacacgacgcatcatgtccctttcctatgtcgcgaaagctatccgttaagtatagcttttatcagacttttcgtttttaactgttcaaatcagaagtcgtattccccggtagaacaatattactggcagcaagttcgcccatgttgttgtatatcgcacaggcagcttcgatgatgggcatcgccagagctgcgccactcccctcacctaaacgcatctccatattgagataaggctccagccccaaatggctgagcgctatacgcgcgcctttttctgcgctcaggtgagaaggaatgagatacggtttgatcgcaggagacatctggcaggctgcgagcgcagcagcataagaaagaaatccatccagcaacacgggtaaaccgcaggaagcagcacctaacatcactccagctattccgaccaaatcaaatccacccacttttgccaggacatcaacaccatcctgaggatttggttgattcaacgtaatcgcccgacgcacaacatcaattttattagccagtttatctgtcggcaggtttgcgccaatcccaaccacttcttcaggatcccggccagtgattgtgctgactattgctgctgccggtgtcgtgtttgccatccccagttcacctacaccaaacagcgtgacaccgttttttgccagctcctgcgtataacatatgacgtccaaaagcaacttttcagcctgacggcgactcattgccggagcactagcaatattgccgctacctcgtgcgacacgcatgttgataagcccggggataggctcagcagtatcaataccaacatcaattacgtggacgttagcgcccgcttgttctgccagcacacacacgccggttgttccacgggtcatattttcagcctgtatggctgtcacttcttttggagaaatagcgaccccttcctcccagacgccgtgatcggcacacataaccagtaccgcttttttgcccacatgcggtatgccattcaaccccggcattcctgccagttgtatggcaagcacctccagctttcccaggctaccaacaggtttgagtaacccgtcaatatgccgttgtgcacggctcatagcggtagaatcgatggctgggatcgtattcagtaaatcggcaagtatttgcatctcacgtctctttatagcagtgccagcaggaagaccagttcaccaagctctatggctgctcccagcgtatcgcccgtttgcccgcccagcgtacgtttgagaagctgaccgaggatgaaaatcgccaccatcgtcaccaccatagcagccacaccatgcatacccggcaataatacggcagcaaaaatagcggctaagccgagtgtgacgcaggtttgtcgcccatcaattttgccaatgaacacattgccaagcccttcttcccgcgcataacgatgacgatacatcaataatgcggcagtcccgcggctgaccgcacatgctgccgccaggcttgcaaggatgctttcgccacgcagagccaactcgcttaacaccagaatctttgccagtaccacaaaaatcaatgccagaccgccgtgggtgcctaaacggctatcacgcatgatttccaacatgcgatcgcggctacgtgcagaaaatacgccatcacaggtatcagcgaggccgtccagatggaatcccccggtcatcagcaccagcacaagtacgctaaacagtgccgccagtggtgcgccacaccatgcctgcagcaccatgaagaccagcccgctaatcgcgccaagcaataatccaatcaaaggaaaagtaataataccgcgagaataatgctcgaaatccagtccctgggaccagcgacgcggtacaggcagacgcgtaataaaactgagcatcgcccaaaataatttactcatttgatttttactccaataccgctaaccaccagccatacttcatttgccgcagcggccaactgctgatttacccgcccggcaatatcacgaaaatgtcgtgccagacgactctccggcacaatccccattcccacttcgttagtcactaatacaacctttgcggggcaacgttggcaggcagcaatcaagctctgaatctcagcattaatcgcctgttccatcgcctgataatcccattcatcagggtctttatcgccgccataatcaaacaacagattagtcaccattgtggtaacgcattcaagcaacacaacctcattcgggttaatgtctgcatgaattaattcatcaagatgttgccagcgctccactgtgcgccagtgctccgggcggccttgccgatgatgttctatccgtgcagccatctcatcatcaaggatttggctggtagcgatatacagaacctgactagagtccccaataagcgcctctgcgtggcgactcttcccgctccgtgcgccccccgtcaccaaaatcatcataccgactcctgattcaaatgtatgatggtattcattgaacagaacaatggatcccccaccgttgctgaccgcaaaacatttacgcgattaatactgcgcgtaatataattaaaaatccagcattctcaatccattacgaaataagatggcattacggaatagccagactttctcgtgttaacgtccgacaaaatgcgtcattgacagcggtttctgtggattgacacatttcattcagataatgaattaatgctactgccggaacaaccagcaaacgggcattgtgttctgaaatccaggctattgattcaacgtcagcgacagatctgcgctgtaaaagaacttgtaaaacaacgtaatagaattatccggaatggtggcgactatgcactagggaaggtgcgaataagtggggaaattcttctcggctgactcagtcatttcatttcttcatgtttgagccgattttttctcccgtaaatgccttgaatcagcctatttagaccgtttcttcgccatttaaggcgttatccccagtttgcagaaactccgtaatgagattaaaagcgctcataactcatctgtcggccagaaggcgcgcctctgaattatccgacggacaaaccgggaacagtgtaatttcccggcaggagcgaaaaaattgaaaggcgcatcttactcttttcgctttcaaaaaaaagagtggtcatcgcgttaacacaccgccctgagatgaattagtgatgttttggctgcaccgcaacatacatttcgatatcccagtacccatcttccgcgccattgttcaaataaacctcgaagcagggctttggtaacatttcataagcactgtcctgcaagagactattaaagaactgataccagggtttagcaaaatcatcaccgactacacgagctaccgccaccgcatactgaccacctgtaatttctgtcagaatgacgccctcactgttttcgggaagcgtaaagtaacccggcaccgtcacgacggtgtcgcagcgtaatttttcggcgggtgtttcatctggattgtcgtaatagacagcaacccactccttcggcacaatatttttgctatctacccacatcatcaactgctcaaagcctttctttaccgtctgttcccacgggccaacgagatggaaacctgcaacggtacgtttctcttcctgcttaatctcgtagttcatgacgcctccattgatactgtttttatatacagtatagttgcaaaattaaaaccacaaggaatgagtgttgattatgcgagcagactcgcactcctgccagtctgctgcaaaagaaaggtcaggccttatggtggaaataatcactcaggcgagaaaacatgctgccttccccgacagattccagggtaaccagcggccagtgcgccacctgtttatcacggtcgtaaagttcaatttcccctacccgctgatgggcgctaattggcgcggtgagttctttaccatcaagggtatatttggctttgatatgtggaatttcggctttcggtagcaccatccagaactcttgttccgttcccaggtcgatattttctttatcgccataccagatgcgttccgttccgacctttttcccacggtgcaaaatttgcaccgtagtaaagttttgttgcccccaacgcagtaattttcttgcctcttcctcacgaccttttgcactgtcagcccccattaccactgcaatgagacgacgctgcccatctacagcgctagcaatgagattaaacccggcaccagaagtatgacccgttttcaggccgtcaacattcatggttttatcccacaacaacccgttacggttttgctgggtgataccgttccaggtgagacttttctcactgtacatatgataaaactcgggctcgccgtggatgatagcacgagaaagcacagctaaatcataagcgctgctatgctggccaggtgcatccagaccatgcactgtttcaaaatgcgtatccttgagatgcagcttctcggcatagttgttcatcatttcaacaaactgccgttgcccaccggcaatatagtcagccagagcaacacaagcgtcatttccggaatccacaattaaaccacggcttaaatcacgtacgcttacgcgatcgccctctttcaaaaacatcagactagaaccgacaaacaccggattatctttcgcccacgcatcgcgccccacggtgacaatatcgtctggcgtaatgcgatgactatcgatagcgcgatccacgacataacccgtcatcagctttgtcaggctggcgggattgcgctgttgatgctcattacccgcggtgaggatctgaccggtggtgtaatccatcaatacccaggacccggcatgaatctctggaggctgaggactaaaaggaatgttttccgccgcaaaaccagagcttaagttaaaaacgaacaaagaagcagcaataataagacggcgtttcaacagcaaaccctcaggagtttcaaatagctgttctttttacggaaatacttatgaactggctggaataaagtgcaagaaaatgtgactaccctctcatttttatctgacatgatctgttgccactcgctgccaaattgtggcgctaaagctgattagcacggtgatatttgatactctggcagacagcagaaataacggatttaacctaatgatgaatgacggtaagcaacaatctacctttttgtttcacgattacgaaacctttggcacgcaccccgcgttagatcgccctgcacagttcgcagccattcgcaccgatagcgaattcaatgtcatcggcgaacccgaagtcttttactgcaagcccgctgatgactatttaccccagccaggagccgtattaattaccggtattaccccgcaggaagcacgggcgaaaggagaaaacgaagccgcgtttgccgcccgtattcacagcctttttaccgtaccgaagacctgtattctgggctacaacaatgtgcgtttcgacgacgaagtcacacgcaacattttttatcgtaatttctacgatccttacgcctggagctggcagcatgataacagccgctgggatttactggatgttatgcgtgcctgttatgccctgcgcccggaaggaataaactggcctgaaaatgatgacggtctaccgagctttcgccttgagcatttaaccaaagcgaatggtattgaacatagcaacgcccacgatgcgatggctgatgtgtacgccactattgcgatggcaaagctggtaaaaacgcgtcagccacgcctgtttgattatctctttacccatcgtaataaacacaaactgatggcgttgattgatgttccgcagatgaaacccctggtgcacgtttccggaatgtttggagcatggcgcggcaataccagctgggtggcaccgctggcgtggcatcctgaaaatcgcaatgccgtaattatggtggatttggcaggagacattagcccattactggaactggatagcgacacattgcgcgagcgtttatataccgcaaaaaccgatcttggcgataacgccgccgttccggttaagctggtgcatatcaataaatgtccggtgctggcccaggcgaatacgctacgcccggaagatgccgaccgactgggaattaatcgtcagcattgcctcgataacctgaaaattctgcgtgaaaatccgcaagtgcgcgaaaaagtggtggcgatattcgcggaagccgaaccgtttacgcctagtgataacgtggatgcacagctttataacggctttttcagtgacgcagatcgtgcagcaatgaaaattgtgctggaaaccgagccgcgtaatttaccggcactggatatcacttttgttgataaacggattgaaaagctgttgttcaattatcgggcacgcaacttcccggggacgctggattatgccgagcagcaacgctggctggagcaccgtcgccaggtcttcacgccagagtttttgcagggttatgctgatgaattgcagatgctggtacaacaatatgccgatgacaaagagaaagtggcgctgttaaaagcactttggcagtacgcggaagagattgtctaatttgaagcctccgccgctggtacggcggaggacaatgttgagtcaggctttttgaacggtgatgctccacgctgcatcgccaatctgctgataatcggtgatggcatgtccttcttctgccgcccactgtgggattgcttcagttgcctgggtgcaatcaaactcaatcactaactcatcgccgctgaccatttctgccagagctgcttttgcttctatgagtggaaacggacagacctgcgtcaccacatccagctttttaatcaccatctttacaccttacttaatttgccgcagcagttgccagtcgcgccttacgctgcggtcgaacatacacaagccaggacgcagtccagactccgagaatcataaatacaaggccaatccagccctgccaggtcatcattgcagtcataaccagtccattaccgatagagcaaccacctgcaatactggcaccgaagcccatcagtacaccacctaacccgctacgtaatgttgtttgtgcatcagctgcgcgaacgcggaactcacggctcgctttggctgcaataaaactccccacgaagatccctaacaccaggaaaacgccccagttaatgtatttcatgtcacccgcgaccagaaattgcagaatattggccgttggggaagtgattcctaacccaaacatgcgtccggttgcttcactcaggggccaggctaaaagcgcaatcaaaccgatgagtacagctgtgacaaagggatgccagcgtttttcaaacagaatatgagcgatcccggttcggcgcggcggtaaggtcgcgactttgagttttggcttcttcaactctttcatcaccacccagagcgttatcaccagcaaaacggcaaccaacggccacacagacaaattaaaagtctcagcaatagagttatgttcagtactgtagtgctgcaaggtttgatttaaaccactggcatgtggagaacgcatcaccgcactcatcaccatataagtgaaaagcgcgatccaactgccgatcaatccctcacccgcgcgataccaggtcccggtggcacatccacccgccagaacaattcccagcccgaagatatacccacctataacagtaccaagccacgggaacgccccggcttcgtaagtcagtaggcccgcctgaattaacgcaaaaacccccacgctttgtacgctaattgcaatcagcaaggcgtaaaacatgcgattatttttcacgatatacatatcgcgaaaaccacctgtcaggcaaaaacgcccacgctgcatgacaaatcccagcagagcaccacaaattagcccgcttaatatcatactaaacataaattaattaaccagatgaatgttaatgaggaaattattcatgactggtggaatgcagaccaataaccaaattctctaaattagaacaaatggttattaatgaggagttcgatacaaaagaataaaaaaaccggagccaaatgttcattcgactccggtttattattagaaaagatgattatgctacgtcttcgtactgcggaaccggattacggaagctcttggtgacgcaagccaggtaaatcagaccgatagcagcccagatcagacccagaaccatactgctttcttccaggttaacccacagcgcaccaacggtcagcgcaccacacatcggcaggaacagatactggaagtgatctttcagcgtcttgttacgcttctcacggatccagaactggctgatgacgctcaggttaacgaaagtgaacgccaccagcgcaccaaagttaatcagcgccgttgccattaccaggtcgaagttgattgccagcagggcaatcgcgccaaccaggatgatgttcatcgccggagtacgccatttcgggtgtacataaccgaagaagcttttcgggaatacgccgtcacgacccattacgtacatcagacgcgctacgcctgcatgcgccgccataccggacgccagtacggtaatggtggagaagatcagcgcgccaacctggaacgctttacccgcaacgtacagcatgatttcaggctgactcgcatccggatctttaaagcgagagatatccgggaagtacagctgcaggaagtaagttgcaaagatgaagatcatgccgccgatcagcgcggtcaggaaaatcgcacgcgggatcacgcgctctgcatctttggtttcttcgctcaggttgctgatgccgtcaaagccggtaaaggagaagcacaggattgtcgccccggtaatcatcgggataacatgcgcatcgccagaccagaatggacgagtgctcgccagcgtaccagcgccttcaccttcaaatacgccataaacaaccatgcccagaatcaccgcgatcagcactacctgcaacacgacgattacagtgttgaagttcgctacggatttcagactacgcaggttaaaggcggtcataaaggccaccagcgccaccacaaacatccagcttgggatggaaggcaccagagcttcaaaatagattttcgccagtagaatgttgatcatcggcgcgaacagatagtcgagcagagaagaccaacccaccataaagccgacagtcgggctaatggatttctgggcgtaagtgtatgcagagccagcagaaggatagcggcgaaccagcttcccgtagctcagagccgtaaacaggatcgcaatcaatgcgaacgcataggctgtcggcacatgaccatccgtgaggccactaacgataccaaaagtatcaaacagcgtcatcggctgcatataggcaagacccatcattacaaccggaactaacgtaagcgttttacgcaattccacgcgagaggtgtttggagtaacgttatggctcatggtcattctcctttacggtgataaccgtcgcgtaagcaaaaaattgccccatttttttggattcctcagcgacaacaactgtcgatttttagtaaatatctatccggtacgaagcccggcctcttggtatgaatgattggtttgaagcaaaaaataaccgacgctgatgaaacgtcggtttttagtcattttttgacagcggcgcattgtgcctaaatgggggggaaatgacaagagaatgagaggcttgtcagaataatttttctttaaatggcactttttccgtcatcagattttgcataaacaccggcgatcgcactatttgctaaaatttcatcccgccaccagccactggcaagtcctgcggtctgttcgttccagccaatccagacgggttcaaagagagtttgggcgaccactttcttctcgattaacgcgccactatcgagaaaacgttgcgccagataacggggtaaatagccgcagccgaggccgctaatttgcagctccagtttggttttaaaatcgaaaacggtaatggcttcttgttcgtcgagaagttgacttgccgtagaagcgcctgcctgcgcagtatcccccaccacaatcgcccgatatcgcttaataatacgacgatttaacggctcttcttccagggctaacggatgatgaggcgcgaccgcaaagacttgttccagatcgcccaaccgactaaaaccaaactcactggaagatggtggctcatgcatcgcgccaacaataatatccgctcgcccctgagtcagggcatcccaactaccaccgagtacgccattgataaacttcaggcgcgtcacgctatgatgttgataaaaagcttcaatgagtggcgcaagcagagaaaaaggaaacgtgtcgtccacgccaatcaccagctcgttttcccagccttcatgcagtttgatcgcctgcttttccagttcccgcacggtatgcagaacttcccgccctttctctaataacatttttccggtgcgggtgaatttagcgcggtgtccgctacgatcaagcaattgaatattaaggtcgctttccagcttgtgaacggtgtaactcagagcggacggcgtcttgtagagtttggcgctcgccgccgcaaaactgccttctttttctaaggcatcgaggatcatcaacacatccagcagtggtttcatacacgcccccttgcagtgcatgcggcgtcctgctggcgtgatcgtttactccagcggcattaccagcggatcgggatactggtattcaaatcccagttcattacaaatccgactgccatcaataatcttacctttgccgctgtccagactatttctgaactgcggaggttccagccccagtaaacgggccatctgcggatagaaaacattacgcgcagggtgagctggcgcacatatattatagatgtgtccgcctttaggtgcctgtaacaacagagtgatagcgccaataacatcttctaaatggactaaattaacaccatgttcaccatcaggcgcggtttttccggcaaagaagcgtccgggatgacgtcccggtccgaccaggcccgcaagacgcagaatatcgacgctagtaccgggtaaattgtgcagccagtcttcgagttcttctaatactcgtccactgttggttactggattacgcggggtggtttctttcaccgtgccttgcgcgtcgccatagacagatgtactgctggtaaaaataatgcggggaatacgatgggccagcgcgctatccactaactcttgtaccgcttgtaaatagaactcatcgccggggccgctacgacgtgccggaagcgtaatgaccagcgcatcggcatccatcagggcatccagatcgtcagaatcgcaaactagctcaggctccatgcgaagcagatagctatcaatgccactcattcgggccgcttcgacaccatcttgtgtggttttactcccggtgacttgccagcctcgcgcactaagactcatcgccagcggcatgcctaaccaccctaacccgacaattgcgacctttttcatccgttatctcctgatacaccttagatctataaggctacgctagcgtatcaaaactgacaattcattctatgaatgaatctgttcaataatgataacgacatgctgcaatgagcagactatcgtcggtaaccgcgtataccagacggtgctcctctgtaatgcgtcgggaccagaaaccactcaaattatgtttcaggggttctggcttccccttaccttcaaatggcgttctgcgggtatctttgataagttcattgatctttttaacaattcgcttatctgtttcctgccagtacagataatcgtcccaactttcctcagaccagattagtttcactcaatgatgtccttttccgttcctttgccacttttcaggctatcgatactgtccatcaatctccgggcgttagcgggggagcgcagtagataagccgtctcttccaggctgttgtattcttcgagactcatcagaacacaagcctctccattctgacgagtaataaggatcggggcatgatcttcaacggctttcatcattgttgcgctcaaattctgacgcgcttcgctgtagctaattgtacgcatgtcaatctcctcttttgtacagttcattgtacaatgatgagcgttaattaactatttattaattagtttgtagatcaaggtattgtcagtgagacgaaaatccaggcttcgctatttttggtgccatcagctaagaggacagtcctcttagccccctcctttccccgctcattcattaaacaaatccattgccataaaatatataaaaaagcccttgctttctaacgtgaaagtggtttaggttaaaagacatcagttgaataaacattcacagagacttttatgacacgcgttcaatttaaacaccaccatcatcaccatcatcctgactaatctttcaggcgatgtgtgctggaagacattcagatcttccagtggtgcatgaacgcatgagaaagcccccggaagatcaccttccgggggcttttttattgcgcggttgataacggttcagacaggtttaaagaggaataacaaaatgacagacaacactcgtttacgcatagctatgcagaaatccggccgtttaagtgatgacagtcgcgaattgctggcgcgctgtggcattaaaattaatcttcacacccagcgcctgatcgcgatggcagaaaacatgccgattgatattctgcgcgtgcgtgacgacgacattcccggtctggtaatggatggcgtggtagaccttgggattatcggcgaaaacgtgctggaagaagagctgcttaaccgccgcgcccagggtgaagatccacgctactttaccctgcgtcgtctggatttcggcggctgtcgtcttagcctggcaacgccggttgatgaagcctgggacggtccgctctccttaaacggtaaacgtatcgccacctcttatcctcacctgctcaagcgttatctcgaccagaaaggcatctcttttaaatcctgcttactgaacggttctgttgaagtcgccccgcgtgccggactggcggatgcgatttgcgatctggtttccaccggtgccacgctggaagctaacggcctgcgcgaagtcgaagttatctatcgcagcaaagcctgcctgattcaacgcgatggcgaaatggaagaatccaaacagcaactgatcgacaaactgctgacccgtattcagggtgtgatccaggcgcgcgaaagtaaatacatcatgatgcacgcaccgaccgaacgtctggatgaagtcatcgccctgctgccaggtgccgaacgcccaactattctgccgctggcgggtgaccaacagcgcgtagcgatgcacatggtcagcagcgaaaccctgttctgggaaaccatggaaaaactgaaagcgctgggtgccagtagtattctggtcctgccgattgagaagatgatggagtgatcgccatgagctttaacacaatcattgactggaatagctgtactgcggagcaacaacgccagctgttaatgcgcccggcgatttccgcctctgaaagcattacccgcactgttaacgatattctcgataacgtgaaagcacgcggcgatgaggccctgcgggaatacagcgcgaagtttgataaaaccacggttaccgcgctgaaggtgtctgcagaggagatcgccgccgccagcgaacgcctgagcgacgagctaaaacaggcgatggcggtggcagtaaagaatattgaaaccttccacactgcgcaaaaactgccgccggtagatgtagaaacgcagccaggcgtgcgttgccagcaggtcacgcgtccggtagctagtgttgggttgtatattcctggcggctccgccccgctcttcagtacggtattaatgctggcgactccggcgagtattgcgggctgtaaaaaagtggtgctgtgcagtccgccgccgattgccgatgagatcctttatgcggcgcagctgtgcggtgtgcaggacgtgtttaacgtcggcggcgcacaggccattgccgcactggcgtttggtacggaatctgtgccaaaagtggacaaaatcttcgggccgggtaacgcctttgtcaccgaagcgaaacgtcaggtgagccagcgtctggacggtgcggcgatcgatatgcccgcaggcccgagcgaagtgctggtgattgctgacagcggcgctacgccggatttcgtggcttctgatttgctctctcaggctgaacacggcccggacagtcaggtgattttactgacgcccgctgctgatatggcgcgtcgcgttgccgaggccgtcgaacgccaactggcagaactgccgcgtgccgaaaccgcccgccaggcactgaacgccagccgcctgatcgtgactaaagatttagcgcagtgcgtggagatctccaaccagtacggcccggagcacctgatcattcagacccgcaacgcccgtgaactggtcgatagcatcaccagcgccggtagcgtatttcttggtgactggagtccggaaagcgcaggtgattacgcctccggcaccaaccacgttctaccgacttacggttacaccgccacctgttccagcctcgggctggcagatttccagaagcgcatgaccgtacaggaactgagcaaagaggggttctccgcgctggctagtaccatagaaacactggccgccgccgagcgcctgaccgcccacaaaaatgccgttactttgcgtgttaacgcccttaaggagcaagcatgagcaccgtgactattaccgatttagcgcgtgaaaacgtccgcaacctgacgccgtatcagagcgcgcgtcgtctgggcggtaacggcgatgtctggctgaacgccaacgaataccccactgccgtggagtttcagcttactcagcaaacgctcaaccgctacccggaatgccagccgaaagcggtgattgaaaattacgcgcaatatgcaggcgtaaaaccggagcaggtgctggtcagccgtggcgcggacgaaggtattgaactgctgattcgcgctttttgcgaaccgggtaaagacgccatcctctactgcccgccaacgtacggcatgtacagcgtcagcgccgaaacgattggcgtcgagtgccgcacagtgccgacgctggacaactggcaactggacttacagggcatttccgacaagctggacggcgtaaaagtggtttatgtttgcagccccaataacccgaccgggcaactgatcaatccgcaggattttcgcaccctgctggagttaacccgcggtaaggcgattgtggttgccgatgaagcctatatcgagttttgcccgcaggcaagcctggctggctggctggcggaatatccgcacctggctattttacgcacactgagcaaagcttttgctctggcggggcttcgttgcggatttacgctggcaaacgaagaagtcatcaacctgctgatgaaagtgatcgccccctacccgctcagcacgccggttgccgacattgcggcccaggcgttaagcccacagggaatcgtcgccatgcgcgaacgggtagcgcaaattattgcagaacgcgaatacctgattgccgcactgaaagagatcccctgcgtagagcaggttttcgactctgaaaccaactacattctggcgcgctttaaagcctccagtgcggtgtttaaatctttgtgggatcagggcattatcttacgtgatcagaataaacaaccctctttaagcggctgcctgcgaattaccgtcggaacccgtgaagaaagccagcgcgtcattgacgccttacgtgcggagcaagtttgatgagtcagaagtatctttttatcgatcgcgatggaaccctgattagcgaaccgccgagtgattttcaggtggaccgttttgataaactcgcctttgaaccgggcgtgatcccggaactgctgaagctgcaaaaagcgggctacaagctggtgatgatcactaatcaggatggtcttggaacacaaagtttcccacaggcggatttcgatggcccgcacaacctgatgatgcagatcttcaccagccaaggcgtacagtttgatgaagtgctgatttgtccgcacctgcccgccgatgagtgcgactgccgtaagccgaaagtaaaactggtggaacgttatctggctgagcaagcgatggatcgcgctaacagttatgtgattggcgatcgcgcgaccgacattcaactggcggaaaacatgggcattactggtttacgctacgaccgcgaaaccctgaactggccaatgattggcgagcaactcaccagacgtgaccgttacgctcacgtagtgcgtaataccaaagagacgcagattgacgttcaggtgtggctggatcgtgaaggtggcagcaagattaacaccggcgttggcttctttgatcatatgctggatcagatcgctacccacggcggtttccgcatggaaatcaacgtcaaaggcgacctctatatcgacgatcaccacaccgtcgaagataccggcctggcgctgggcgaagcgctaaaaatcgccctcggagacaaacgcggtatttgccgctttggttttgtgctaccgatggacgaatgccttgcccgctgcgcgctggatatctctggtcgcccgcacctggaatataaagccgagtttacctaccagcgcgtgggcgatctcagcaccgaaatgatcgagcacttcttccgtagcctcagttacaccatgggcgtgacgctacacctgaaaaccaaaggtaaaaacgatcatcaccgtgtagagagtctgttcaaagcctttggtcgcaccctgcgccaggccatccgcgtggaaggcgataccctgcccagcagcaaaggagtgctgtaatgaacgtggtgatccttgataccggctgcgccaacctgaacagcgtgaagtctgccattgcgcgtcacggttatgaacccaaagtcagccgtgacccggacgtcgtgttgctggccgataaactgtttttacccggcgttggcactgcgcaagcggcgatggatcaggtacgtgagcgcgagctgtttgatctcatcaaagcctgtacccaaccggtgctgggcatctgcttagggatgcaactgctggggcggcgcagcgaagagagcaacggcgtcgacttgctgggcatcatcgacgaagacgtgccgaaaatgaccgactttggtctgccactgccacatatgggctggaaccgcgtttacccgcaggcaggcaaccgcctgtttcaggggattgaagacggcgcgtacttttactttgttcacagctacgcaatgccggtcaatccgtggaccatcgcccagtgtaattacggcgaaccgttcaccgcggcggtacaaaaagataacttctacggcgtgcagttccacccggagcgttctggtgccgctggtgctaagttgctgaaaaacttcctggagatgtgatgattattccggcattagatttaatcgacggcactgtggtgcgtctccatcagggcgattacggcaaacagcgcgattacggtaacgacccgctgccgcgattgcaggattacgccgcgcagggtgccgaagtgctgcacctggtggatctgaccggggcaaaagatccggctaaacgtcaaatcccgctgattaaaaccctggtcgcgggcgttaacgttccggtgcaggttggcggcggcgtgcgtagcgaagaagatgtggcggcgttactggaagcgggcgttgcgcgcgtagtggtcggctccaccgcggtgaaaagtcaagatatggtgaaaggctggtttgaacgcttcggtgccgatgccttagtgctggcgctggatgtccgtattgacgagcaaggcaacaagcaggtggcagtcagcggctggcaagagaacagcggcgttagtctggaacaactggtggaaacctatctgcccgtcggcctgaaacatgtgctgtgtaccgatatcagccgcgacggcacgctggcaggctctaacgtctctttatatgaagaagtgtgcgccagatatccgcaggtggcatttcagtcctccggcggtattggcgacattgatgatgtggcggccctgcgtggcactggtgtgcgcggcgtaatagttggtcgggcattactggaaggtaaattcaccgtgaaggaggccatcgcatgctggcaaaacgcataatcccatgtctcgacgttcgtgatggtcaggtggtgaaaggcgtacagtttcgcaaccatgaaatcattggcgatatcgtgccgctggcaaaacgctacgctgaagaaggcgctgacgaactggtgttctacgatatcaccgcttccagcgatggccgtgtggtagataaaagctgggtatctcgcgtggcggaagtgatcgacattccgttttgtgtggcgggtgggattaagtctctggaagatgccgcgaaaattctttcctttggcgcggataaaatttccatcaactctcctgcgctggcagacccaacattaattactcgcctggccgatcgctttggcgtgcagtgtattgtggtcggtattgatacctggtacgacgccgaaaccggtaaatatcatgtgaatcaatataccggcgatgaaagccgcacccgcgtcactcaatgggaaacgctcgactgggtacaggaagtgcaaaaacgcggtgccggagaaatcgtcctcaatatgatgaatcaggacggcgtgcgtaacggttacgacctcgaacaactgaaaaaagtgcgtgaagtttgccacgtcccgctgattgcctccggtggcgcgggcaccatggaacacttcctcgaagccttccgcgatgccgacgttgacggcgcgctggcagcttccgtattccacaaacaaataatcaatattggtgaattaaaagcgtacctggcaacacagggcgtggagatcaggatatgttaacagaacaacaacgtcgcgaactggactgggaaaaaaccgacggacttatgccggtgattgtgcaacacgcggtatccggcgaagtgctaatgctgggctatatgaacccggaagccttagacaaaaccctcgaaagcggcaaagtcaccttcttcagccgcactaaacagcgactgtggaccaaaggcgaaacgagcggcaatttcctcaacgtagtgagtattgccccggactgcgacaacgacacgttactggtgctggcgaatcccatcggcccgacctgccacaaaggcaccagcagttgcttcggcgacaccgctcaccagtggctgttcctgtatcaactggaacaactgctcgccgagcgcaaatctgccgatccggaaacctcctacaccgccaaactgtatgccagcggcaccaaacgcattgcgcagaaagtgggtgaagaaggcgtggaaaccgcgctggcagcaacggtacatgaccgctttgagctgaccaacgaggcgtctgatttgatgtatcacctgctggtgttgttgcaggatcaggggctggatttaacgacggtaattgagaacctgcgtaaacggcatcagtgagttgcggggtaagcggatgcgatattgttgccgcatccggcaaaaaaacgggcaaggtgtcaccaccctgccctttttctttaaaaccgaaaagattacttcgcgttgtaattgcgtagagcattacgccccagcacaatccccgcgccaaccatgccacccagcagcaccgccagaatcaaggtaattgcctttttcgggctatcacgacgaataggtaacatcggtttcatcacataacggtaagcatgaatatcaagatcatcaacttttaagctttcgatatccagcaggttttgacgagtctgatagtagtttgggctgaacaccaacggacgggtcgcctcatgcttaatcatgctctccagcgcttcgctccccaaaaggaacaacgtatcttgtgtgatatcttcgccagtctgttgaatctgcggttttgtcacctgcgcctgattcgcatactgcaacgcttcctgaatctgacggatacgcagatctttctgctcctgcgcgactacttcctgcgttcttaaagagtcctgcaagtttttccgtcccagagcaatgttgtctttgagatccttttctagctcttgattcactttatcgtcaacttgctgaatgtattgggccaacttcatttgtgcgccctctgcagtttgcccaacataagaaacagtcaatggtaattgctggttcttaacagaaggttcgatggtaagtttttctcgttcttcctgattatccagcgtttctgctaatgcagagaaggcagaactgaagcgaccaattaacgtctcctgcaaatcgcttactttcggtgcagcctgaccatagataacattcatggcattgttatagccagcaatttgccccacgtcgggctgagtgataattgctgtactcgtccatttctccttcgctactgccaaatatccaatagccagggcaatagccacaatgacggaaatgatgattgtcatcttgccacgccacaactgcactagtaaatcaatcaaatcaatctgttccgggtcatggttttgcccagaaacattattattttctactctcatcattaccctaactgacggaaatttccaagtccgcatagtttagcgataatcctcgtgaatgctataggataagtgataaaaataatgaattgttgtgtaagtaacaaaagacaatcagggcgtaaatagccctgataacaagatgttagtcgctgccaaagagatcgcgggtgtataccttatctgccacatccttaagctcttctgccattcggttagagataatgacgtcggcttgttgtttgaaggtggcgagatcacgttccaggcgagagttgaagaaactgtcttctttcatcactggctcgtagatgatcacttcaacacctttcgccttgatacgtttcataatcccctgaatagaagacgcacggaagttatcactaccgctcttcataatcagacgataaatacccaccacttgcggcttgcgactcaaaatggcatcggcaataaaatctttacgcgtgcggttagcatcgacaattgcgctgatcaggttattcggcacagactggtagttcgccagtaactgcttggtatctttcggcagacaataaccaccataaccaaagctcggattgttgtaatggttgccaatacgtgggtcgagacaaacgccttcgattatttgacgggaattcagacctaaactttctgcatagctatccagttcgttaaagtacgccacgcgcatcgccaggtaggtgtttgcaaaaagtttaatcgcttctgcttcagtggagtcggtaaacagcatcgggatattttgcttaatcgcgccttcctgtaacagagcagcgaaacgttctgcgcgttcactacgctcaccgatgacaatacgactaggatggagattatcgtaaagggctttaccctcacggagaaattccggggagaatataatattttcagtgcgatatttcttatgcatcgctgcggtaaaaccaacgggaaccgtacttttgatgaccataaccgcataaggatttatctcaactacgtctttaattacactttctacactggatgtattgaaataattagttttaggatcatagtcggttggagtggcgatgatgacataatcagcatcccggtaggcttcatttttatctaatgtggcattaaagtgtattttatcactttgcaaaaactgctgaatttccttatcaacaataggagatatccgatcattcagcatagcaacgcgactcggtaaaatatctaatgccacaacctcatgattttgtgcgattagaagcccgttactcaagcctacatagccagtaccggaaatggtgattttcatttcatgctctcagaattaacttaactgtgaatcatgatgtttttagcatcctgataagagctaaaagttttaacgctacgttgttcgatggtcaacgcaacgaaaaacaattcagattttctttataagaatagctgatatttattaagttaatattaagcagtgaaatttagtctataagatatttggcaaaaaaaagcccggtgcaatatacgccgggcctcaattttattgttggttaaatcagattaatccagccattcggtatggaacacaccttctttatcaatacgcttataagtatgcgcaccaaaatagtcacgctgtgcctggatcaggttcgcaggcagaacagcagcacggtagctgtcgtaataggcaaccgctgcggagaaggtcggaaccggaataccgttctgtactgcataagcaacgacatcacgcagcgcctgctggtagtcatcggcaatttgcttgaagtacggagccagcaacaggttagcgatctgtggattttcggcataagcatcggtgattttctgcaggaactgcgcacggatgatgcagccagcacggaaaatcttcgcgatttcgccgtagttcagatcccagttgtactcttcagacgcagcacgcagctgagagaagccctgggcgtaagaaacgattttgcccagatacagcgcacgacgaactttttcgatgaactcagccttgtcgcctgctggctgtgcttgcggaccagagagaactttagatgcggcaacacgctgatctttcagagaagagatataacgtgcaaacacagactcggtaatcaggctcagcggttcgccgagatccagcgcgctctggctggtccatttaccggtacctttgttagccgcttcatccaggatcacatcaaccaggtagttaccgtcttcatcttttttggtgaagatatctttggtgatgtcgatcaggtaactgctcagttcaccgttattccactcggtaaaggtctgcgccagttcttcgttggtgaggttcaggccacctttaagcagagaataggcttcagcaatcagctgcatatcgccgtattcaataccgttgtgaaccatcttcacatagtgacctgcgccatcggcaccaatataggtaacgcatggttcaccgtcttcagctacggcggcgattttggtcaggatcggtgctaccaattcataggcttctttctggccaccaggcataatagaaggacctttcagcgccccctcttcaccgccagaaacaccggtaccgatgaagttaaagccctctgcactaagctcacgattacgacgaatagtgtcctggaagaaggtgttaccaccatcaatgatgatgtctcctttatcgagatatggtttgagggaatcaatagcagcatccgtgcctgcacctgctttcaccattaacaggatgcgacgaggcgtttccagagattcgacaaactctttcaccgtatagtaaggaaccagtttcttgcctggattttcggcaatcacttcttccgtcttctcacgggaacggttgaaaatagagacggtataaccacggctttcgatgttgagcgcaaggttgcgtcccatcactgccataccgactacgccgatctgttgcttggacattacatactcctgtcaggtgtgatcaccgcgctgaatgctcgcggcctggaatgttcgcaaataagtatacaaagtacttattaaagtataaatagcttatccatgcttatatgcttacggctttatatgtctccacatgcgatatttcttaaataatgttttattattaccacttttaattcagggataatgtgaggttattaccctcaaataatatgagataaatagtgctgcaacattgcatttttgccccgatttatccatgatcgaattgtgacatttgtcatacaacgaataggttttgtacttactatggaatggattgccgatccgtctatctgggccgggttaatcacgctgattgtgatcgaactggtcctcggcattgataacctggtctttattgccatcctcgccgaaaaactaccgccgaagcagcgtgaccgcgcacgggttaccgggctgctgctggcaatgttaatgcgcctgttactgctggcgagtatctcctggctggtcaccctgactcaaccgctgttcagcttccgcagctttacctttagcgcccgcgacttaatcatgctgtttggtggtttcttcctgttgttcaaagccacgatggagctgaacgaacggctggaagggaaagacagcaataatcccacacaacgcaaaggtgcgaagttctggggcgtggtgacgcaaattgtggtactggacgccattttcagtctcgacagtgtgattaccgccgtcgggatggtcgaccatttactggtcatgatggccgccgtggttatcgctatcagcctgatgttgatggccagcaagccgttaacgcaatttgttaacagtcacccgacgatcgttattctctgcttaagcttcctgttgatgattggctttagcctggtggcagaaggtttcggcttcgtcattccgaaaggctacctgtacgctgccattggtttcagcgtgatgatcgaggcgctcaatcagttggctatctttaaccggcgacgttttctttccgctaaccagacgctgcgccagcggactaccgaagcggtaatgcgcctgcttagcgggcaaaaagaagatgcggaactggacgccgaaaccgcgtccatgctggtggatcatggtaaccagcagatctttaatccgcaggaacggcggatgattgagcgggtacttaatcttaaccagcgtaccgtcagcagcattatgacgagccgccacgatattgagcatatcgatctcaacgcgccggaagaagaaatccgccagttgctggagcgaaatcagcatacgcggctggtggttaccgacggtgatgacgcagaagatttgctcggtgttgttcacgttatcgacctgctacaacagtctctgcgcggcgaaccgctcaacctgcgggtgttgattcgccagccgctggtgttcccggaaaccttgccgttgttacctgccctggagcagttccgtaatgcccgcacgcactttgcttttgtggtggatgagtttggcagcgtggaagggattgtgacattaagtgacgtcactgaaaccattgccggtaacttaccgaacgaagtggaagagatcgacgcccgccatgatattcagaagaatgcggacggttcctggacggcgaatggtcatatgccgctggaggatctggtgcaatatgtgccgctgccgctggatgaaaaacgtgaatatcacaccattgccgggctgttgatggagtatttgcagcgtattccaaaacctggcgaagaagttcaggtgggggattatttgcttaaaacgttgcaggtagaaagccatcgcgtgcagaaggtgcagattataccgctgcgtaaggatggcgagatggagtacgaggtgtgatggtatcggtcattttacccaatagccgaaaggaataagatgagggaaccgcgccatcggcgatttaccgccgggagcccgggttgccagggtggtggagattgagccaccctggcacgttcaccggcttgagcgttccatagtagcgaggaacatcaagtgaacggaacagccttcgatcttacatattcagaatataatgatgccgccacgaacgcctgatgcgacgctttacgcgtcttatcaggcctacaggactggtcacctggtaacttacatcttctccagcaacttcttcacatctttgccattacgggaatctttattccgctcggcccagtcattcaggcgacgtttcgcttcgtcctgtagatgtttgcgcagtaactgatccacttgcaggctgtaattgagttgctgccagttgccataaacccgcagcggtactggcgtttctttcaggaaatcaatcagtttgctttccccgttccagccacccacgacccgaatatcaaactgggtgtcgcaggtttgatctgccagattcaacatgccttcccctgtcagcgccagcacagggctttgaccttgcatgtcgtttaacgtcacgacgccatccttcaacgtcaaatcggtggtaaagcggtcaagccgcgtcacgttatcaaagttttcagcggccttcacatcaccgccattacgctctaccgcttgctgaatcatctgctggaagttcatcccttccatgcgcgtgtcggtcatttcgacatgtgcctgtccttgccagttgtggcggaatgcgtcggcatctatgtcagcaccggagaaatcaccagccagactcatttttccggtcaagctaatcggatagttaaacgccttcagaatggtaccaatctcaacgttttccagccgtggctggaagtttatccgcggatttatacttgtcgcgtccagcgtgcccggcagactaacctgtccaccgttaagtttgccctgcagttgagtaatttccagcaaaccgctcttgttggtcatttgcgtggcaacatctgtaaaattcattccgcgccagcgcacgttactggcctgcaacaaaatatcagccgtaaagccttgcagtccctgataggccggttcatcaatacggctagaaatgaccgggcgcggcaacgtactttggctctgcccctgctgcgcggcaccgttttcaccattcgcggtttcattaagcgggatgaggttgtcaagattcagttgcgggaattgcagcctcagctgccattccggtttctctgtcagcgtaacctgtgcttgcccgcttagcgtactatcattggcggtcaaactaatttggttaaaactaaggcgtttatgactctcctgccactgggcctggaaactcccctgcccctgaataccttgttttggtaaatcggcaccctgcaactgccagttaatttgttcaatagccgccgttaaatcatgcggataatcagaagcatctaccgtaccgttaagggatatcgtgagatcgcgctgatcgcgattaacccgcccggagaactcaaaactaccacgatgttggggatcttgttccatttgcaggcgaatattgcggattgtcacctgctcgtcatcttcatgctggaacaccagcacgctgtccgccaccttaagactggatatatcaaagctccatccgcgatcgtcactcagatccggcaaggtattgtcgcgcggtgcaaccggagcgtcttcactgcgcaccgcttccgtctgcggcgtcagttggatcactgccccttttagcatcacctgcttaacgctcagttgatgactcagtagtggtaaaagcgccacgtccagacgcatgttgtcggcgcgaaccagtggctggcttgcgccctgggcggtgagagacattcgcccggagaggatactaagctgcggccagacgtgccaacgcagtggcccgtcgagctgcaattgataaccgctacgtgcagcaacttgcttgaccatatagtcgcggaaatcattcggattcaccagcaacactaacgcagataacccggccaccagcacgaccaggagtatcatcagcgtcgtcagaaatcgtctcatggtatcctcaatgggcctgaattagtctttatcgattcggctggctaccgcgccctgctggttgcgatatttcgcatcttcacggcggttgtaaggtcgcaccgccgggccggaaagcggctcaaagctcagcgcaccaattaacatgcccggacgcagcgccagcggcagcttaccggagttgtagaactccagcacaatgcaaccagaccagcccggatcgatgcggtgcgcggtgacgtgcaccatcagccccagacgcgccagactggaacgcccgtccagccagcccaccagatcggctggcagcgtcacgctctccagcgtcaccgccagcgccagctctcctgggtgaagatagaacgcctcgccctcgtcgagaacgatctcatcgctcatcacgcggtcaagcgcggcgctcacttcatctttgggaccgctcagatcgataaacgctgccgtgtgaccacggaaggtacgaaatttattgcccaggcgtacatccaccgtcgcgccgttaatacgctccactggcggacgtgggttgatgctcaaacggccttcatcaagccaggcttcaatatctcggtcacacagacgcatggcattttctcctttcgcgcatcactcccttaacgccaattacgtcaagggcatactaggttatcactgaacggtacacaatttatcaagcttattcaaagaactgacttattttcgctttcaatatatcgatcgcgatgcggtttttcccgccgcgcggcacgataatgtccgcatattgtttagaaggctcaatgaattgcaggaacatcgggcgcacggttttttgatattgcgccatcacactatccatactacgcccacgctcgttaacgtcacgcttgatgcggcgcatcaggcagatatccagcggggtatcaacgaaaatggagaagttaagttcgtcacgcaaacgcgcatccgtcagcaacaaaatgccttcgagaatgatgaccttcttcggctcaaccgtcaccgtttctttcatacgcgtatgttcaacatagctgtaaaccggcaggtcaattgcgctgccgcgtttcaacgcttgtaaatgctcaagcagcagactgtgatccatcgcgctgggatggtcgtagttggtcttaacgcgttcttccatgctcagatggctttgatctttgtaatagcagtcttcgggaattacgccgatgtgttcatcaccgacttgctcacgcaattcacgataaagggtactggcaataagactcttgccggaagcgcttgcgccagcgataccgataatgacgcactgatgagactgatcagtcatatatttagcgacctgattaacctggatgttaggaagggggcgacgaagcgccaaacgcggcaattatagggatttcatccgtctgataccagtcgaatagcgttgccgcgcgctcagagttaattgttgacaaagaattcccgggggcaaattacgttgatcagttttatgtaaggtaaaaaatgttaaacgcagttgcgcaaattatccgcctttacgtcactttatgagcaattcgcatataaaatgtaaaacttttgtactagcataaacacagaaacgaatactggcgaccaggtcttgcggataaagcggtaatgagcaaacaaagtcagcatgtattaattgccctgccccacccgctgcttcacctggtcagtttaggtttagtcagctttatctttacccttttcagccttgagcttagccagtttggcacccaactcgccccactgtggttcccgacgtccatcatgatggtggcgttttatcgccatgccgggcgcatgtggccgggaattgcgctgagctgtagcctgggaaatatcgccgcatccatcctgcttttttccaccagcagcctgaacatgacctggacgaccatcaatattgttgaagccgtggtcggggcagtgctgctacgtaaattgctgccgtggtataaccccttgcaaaatctggctgactggctgcgtctggcactcggcagcgccattgttccgcctctgttggggggtgttctggttgtcctgctgacgcccggagacgatcctctcagggcatttttgatatgggtactgagtgaatccatcggcgctctggcactggtgccgctgggattgttatttaaaccacactatctgctgcgccatcgcaacccacggttgctttttgagagcctgctcacgttagccatcacactgacgttaagctggcttagcatgctgtatctgccgtggccttttactttcattattgtgctgttgatgtggagcgccgtgcgtctgccacgaatggaagcctttttgatcttccttaccacggtgatgatggtgagcctgatgatggccgcggatccccccctgcttgctacgccgcgtacgtacctgatgagccatatgccgtggctaccgtttttgctgatcctgctgcccgccaacatcatgaccatggtgatgtatgcctttcgtgcggaacgcaaacacatttccgaaagcgaaacccactttcggaacgcgatggaatattccgctatcggtatggcgttagtgggcaccgagggacaatggctgcaaaccaacaaagcgctctgccagtttctcgggtacagtcaggaagagctgcgcggactcacctttcagcaactgacctggccggaggatctcaataaagatctccaacaggttgaaaagctgataagcggtgaaataaacacctatagtatggaaaaacgctactacaaccgcaatggcgatgttgtctgggcgttgcttgccgtcagtctggtgcgccacacggatggcacgccgctctattttatcgctcagattgaagacattaacgagctaaaacgcaccgaacaggtcaatcagcaactgatggagcgcatcactctggctaacgaagcgggcgggattggcatctgggagtgggagttgaagccgaatatttttagctgggataagcggatgttcgagctgtatgaaattcctccacatatcaaaccgaactggcaggtgtggtacgagtgcgtgctgccggaagatcgccagcatgccgaaaaagtgattcgtgatagcttgcaaagtcgcagcccctttaaactggaatttcgcattaccgtaaaagacggtattcgccatatccgcgccctcgccaaccgggtactgaataaagaaggcgaagtcgaacgtctcctcggcatcaatatggatatgaccgaagtgaaacagcttaacgaggcattgtttcaggaaaaagagcgcctgcacattacgcttgattccatcggtgaagccgtggtctgtattgatatggcgatgaaaattacctttatgaatccagtggcggagaagatgagcggctggacgcaggaagaagcgttaggtgttccgctcctgacggtgttgcatattacttttggcgacaacggaccattaatggagaacatttacagtgccgacaccagtcgttccgcgatcgagcaagatgtggtgttgcactgtcggagcggcggcagttacgacgtgcattacagtattacgccgttaagtactctggacggcagcaatattggtagcgttctggtgattcaggacgttaccgaaagtcgcaaaatgctgcgccagctgagctacagcgcctcccatgatgcactgacgcatctcgccaaccgcgccagttttgagaaacaactgcgtatcctgctgcaaacggtaaacagtacacatcagcgacatgccctggtgtttatcgatcttgatcgctttaaagcggtgaatgacagcgccgggcatgcggcgggtgacgctttgctgcgcgaactggcgagcttaatgctgagtatgctgcgttccagcgacgtgctggcgcgactcggtggggatgaatttggtctgctgctaccagactgtaatgttgaaagcgcgcgttttatcgctacacgcattatcagtgccgtgaatgactatcactttatatgggaaggccgtgtgcatcgggtaggtgccagtgccgggattaccttgattgatgacaacaatcatcaggcggcagaagtgatgagccaggctgatatcgcctgttatgcctccaaaaatggtggccggggccgggtgacggtttacgaaccgcagcaagctgccgcacatagcgaacgggcggcgatgagccttgatgaacagtggcggatgattaaagagaatcagttgatgatgctcgcccacggtgtcgctagcccacggatcccggaagcgcgtaatttgtggctgattagtcttaagctctggagttgcgaaggcgagattattgatgaacaaacatttcgtcgtagcttcagcgatccggcgcttagccatgctcttgaccgccgggtattccacgaatttttccagcaggccgcaaaagcggttgccagtaaaggcataagcatctccctccccctttccgttgccggtttgagtagcgccacgctggtgaatgatctgcttgagcagctggaaaatagccctctaccaccacggttattacatctgattattccggctgaagcgattttagatcacgcagaaagcgtgcaaaaactgcggctggcgggatgtcggatagtgctcagccaggtgggccgcgatctgcaaatcttcaacagcctgaaagcgaatatggcagattacctgctacttgatggtgagttatgcgccaacgtgcagggtaatttgatggatgagatgctgattacgattattcaggggcacgctcagcgactcgggatgaaaaccatcgccgggccagtcgttttacccttagtgatggatacgctttctggcatcggcgtcgatctgatttatggtgaggtgattgccgatgcccaaccgctggatttgctggtgaatagtagttatttcgcgattaactgaggcgtgcttccccatcgcctgatgcgacgctaacgcgtcttatcatgcctacaaatcgctcattccccaggccggataaggcgctcgcaccgcatccggcgaccaacgtcatgcttcgtctggttgccagccttccgtataccagatatgcaacagcgcataagaacgccagggcttccagcgctcggcataacggcggatttgcgccggtgtcattcccggaaatcgctgtttaatcagataatcatccggcaggaaaacatctttcgcctgccagccacgcaaagcaaaataattcgccgtccagcgcccgatacccggaaaagtttgcagcgttttcatcgcctgctccacatcgcccggtattgtcattggtaaggtgccctccagcgccgcatttgccagatgaatcagcgcctctgcccgtttcaacggcatacctaacgcttttaatgcctgcgggtctgctgctgccagccgctgaggcgtcgggaagcagatatactccggaaaatcatccagccgttcgccataaagctgtgccactctggcggtcaattttgccgccatcgccacgctcaccagttggcctaaaatcgcccgcacgccctgctcaaaagcatcaacacagccgggtaaacgcaatccgggccgcgccgcgcctaacctgcccaacgcaccgttaacaatttgtgggttacattgcagatcaaacaggcggctcattttcgccagacactctgcggcaacaggttctaaacctgcacttaaatttatgtgcagagtatggcgggctatatccggaatagcagtcaccacgccgcgatattcgcccaccgccagactacgggcataataactgtccgcgaccgtttccacactgctcaccgcacgggcggcgagaaatcccaacatccagctccagtcatacggcggctgccagttcagggtatacatcgcatctccttattcatccgctttcagcataaacgttattcagacgctgcgctttgctttcatattccggttgtcgcgacggcaacatttcgctaaagtcacgccccttcttcaccggcatggggattatttcgtgtttattggttttgattacggtacagcaaactgtagtgtggcggtcatgcgtgacggtaaaccgcatttgctaaaaatggaaaacgacagcacgctgctgcctagtatgctttgcgcgccaacgcgtgaagcggtaagcgaatggctgtaccgccatcatgatgttccggcagacgacgatgaaacgcaggcgctgttacgtcgggcgattcgttataaccgcgaagaagatatcgatgttacggcgaaaagcgtgcagttcggtctttccagtctggcacagtacattgatgatccagaagaagtgtggtttgtgaaaagtccaaaaagcttcctcggtgccagcggcttaaaaccgcagcaggtagcgctgtttgaggatctggtctgcgcaatgatgttgcacattcgccagcaggcgcaggcacagctgccagaagcgattactcaggcggtgattggtcgtccgatcaacttccaggggctgggcggtgatgaagcaaacacccaggcgcaagggattctggaacgcgcggcgaagcgtgccggattcagggacgtggtattccagtacgagccggtcgcggctgggctggattacgaagccaccttgcaggaagaaaaacgggtgctggtggtggatatcggcggtggtacgactgactgtagtttgctgctgatggggccgcagtggcgtagccgtctcgatcgtgaagccagcctgctgggtcacagtggttgccgtattggcggtaacgatctggatatcgcgctggcgtttaaaaacctgatgccactgctgggtatgggtggcgaaaccgaaaaaggcatcgccctgccgatcctgccgtggtggaatgcggttgccatcaacgacgtacctgcgcagagtgatttctacagtagtgccaacggtcgtctgcttaacgatctggtacgcgatgcccgcgaaccggaaaaagtggccctgttacagaaagtctggcgtcagcgtttaagctatcgcctggtgcgtagcgcagaagagtgcaaaattgctcttagtagcgtagcggaaacccgcgccagtctgccgtttatcagcaatgaactggctacgctgattagccagcgagggctggaaagcgccctcagccagccactgacgcggattctggaacaggtgcaactggccctggataacgcccaggaaaaaccggacgttatctacctgaccggcggtagcgcccgttctccgctgattaaaaaagcgctggcagaacagttgccgggcattccgattgcaggcggcgatgactttggctccgtcaccgccgggctggcacgctgggcggaagtggtgtttcgttaattgaaaaatggctcagcagcggcttaaatctgcctgcgcctgagccagtttttctgctgcctgacgtaacggttccatcaacggcatggtccgtgctggagcatgaaggcggaatcgctgcaactctgtcgcgccgactgtcaacgcgctttccagccgatgtcgtttggcggtcattttcgccattaccgcttgtctgtctgctggcgttatcgcttcattcggcctgaacacaaaacggcgttcacagctcgctttccagtcgataaccgcctgggtcagatggtcgccaaaccctttcacttgcttaacgccacgacgggtaacatctgcggctgtttcaataccaaaagaccgtaacgccgctttacgcgcagggccaacgccgggaatagaggcaacatcaataaaaaatccctccagaaacttctgcttctgccgttcccttgcagtgtcatgaagtgctgccagagcgcgtttctcttcttccggtaacccgagaatttcgtccttcattttttcgagcatcgtccgtttggcgataaaaccttccaggccgcctacctgctggatctggcggactaaatggtcatagtccattttcgcacgattaaatgcctcacggcgttgctgaacttctgctttgtacgctttgcttgtcagactgccaataatccagatagccgccagcacaggaaccaaaataatataacgcggttctgcctgaaggccgcaaagcagcaggcttaatgcactcagtgcgatctcaagcagaatgatgtattcgcgccgtaacaggcctaaaggaagcggcctgccagtcggttggaaatgatcgggtaatggcagttgcaatgctggcggtgctacactcgccatcaccatcgcccagactttcgccagcacaaaattcccgccggtggtaatgacctcttcgccgagatcaataaaatagataacaccttgattatccagcgcacaccacgggcagtcagtcaaatgagcggggtaaacatgcattgcactaacgatacatttctttaactgttggcgtagagagtccagtgccgctacccacgctttagccgtcggacgcccggttgccacgccactttccgtgaatgcctgctgaaacatggcttcaacatcactcggtaacatgcttagcggaatagatcgtggcggcggttttaaaccacgtcgctgattatcactcgcgtaggcataacggaaatgggtaatatccgtctccagcgcattacccgcatcagagataagcggcacaccagaataaggatgccgcccaccaaacaagacgtgaaaaattagcaacgcaaggccaaaattatcgtgattttctgtgcgttcaaaaccgacaaaacttggcaaggtttgtagctctggcggcgtaaaatggctcacgccgacttcgcataaatgcagtgtgccattggcgttaatttgaaaggagtcgctatcaatcagtaccactttgctgtcgcgacctaccataaaactgttctggtttacgtcacccacgacgtgcccgtgctcgtgaaccgtagcaaaagaactagcaatattgcgcgcaacatagagtagaaaatcccacgcacaatgagggtaactctggcgacgatgtgccgggctatagatcatatgaatcggttctttaccagaaacttttggcatcataaaaccgataacttttccgcctcgtccaccgtgaagcgttgcctgcggccaggcgacataattcaacaactgcgcgtcagctgtcgcagccataaaggcaagtttgtcctgttttaaggcgggtggcggcgtgtgataaatcttggcgacgctatcgacaaactcctcgatatcataaaccgcgccttcaccacctttgcccagttcacggccaagagtggtcaattcacctgtgcttgtaaatacttttatatttgttttcataatatttcgcgggtagttatattatatttcaatgaataataacaactaaccattaaaattatttctatatggggaaaacccactcaagaataaaaatgataatgcaattttatcaggatacaattcaatttcggcctgataatgattaacttccacaggtttttgctaactttgactacaaagggattctggagaaaaaatgaaaaagatattacttatgttgagtctgctattttttactaccgcgggctttagtgaagttagcgatacgttagtgacgggaggttatgataaacaagcgatgtctgacgcgattaaacatgcgcggaaagaaaccgataaattcatcgaggttatgaataaaaaagatgccgatactttcgcagtcaaagccccgataaccgatcacggaagaaccgagcatttctggcttacggatgtcacttattctaacggcatgtttattggcgtaatcagcaatgaccctggtattgttacaaacgtagaatatggccaggagtggaaaatcaagaaagaagatattagtgactggatgtatacgcgcggggataaaatttacggcggttataccattgatcctttattggtcacctatccaaaagaagaagccgacgagctaagagcaaaattagttcgctaatcagccgttatatttattgtttaaactggcggttgaattgttgtcttcaaccgccatgagaaactcactctgcccacagcgccagtgccaacgttttatcatcatccgtacgctcgtttaccgccgggctggacaaaaactgctttaacaattcaggtaataaatcgagttgttcctgcgttgctgccgccagtccattgaaaaacggggtaaagaaaggcacatgaggagaattatccagcatatttaacgccagtcgctggataccatccgtaaatgctgcaactttgtgcgcacgcccagtgctggtgagagtttccagtctggaaacggcatcttcgtcggtaatgaagtgcgtcatgttggcatattcacccgccatcggcgtgagaggcaattgcagaccgtgacccaaatctaccaccacgccgccatcgccaatctgcataatcaaggtgccgtcagggctactaatcagtcccagaaatgtgcaggcaaaatcgcgaaccgctaattctttggcttccgcctcggcaaaaagtcgttgacgaatggtcagtaccatatttgtggcgaggacatcattaagccccaattccccgccctgcactttttggctcatataagccatcgcttcattgacggcgagcatcgcgccttcgccaccctggctgacactgcctgcgccatcagcgacaaatacgctcaataatggctgctggtcatttaaccaggcaatctgcatctggcaggcatcctgacaaggcaagtccgcgctgatgtggctcgttccaacggtacttgcatagaccagacgccagctcacacactcgtccagccttttggcgcttccagcacaacttccgttcccggcgtggagcgggaaacgctacgcaggctactggataaccagctaaacagttcacggaattgtaatccttgcagaggcaaaggctgacgaacgctaatttgtgccagcgtcttcatatccgccccctgaacaccgatggaaaagaaagcaaaccttttatcttcttccccccgaaacactttgttggctgcagcctgccactcatcggttggtgcaccatcggtaatcaggaaaatccacgggcgataatagctaataccatttgcacgatactcacgtttccgctcctctaccatatccagggctttggtaatggccgcacccattggtgtatcgccctgggcaaacaggatgggcggaaaaaaattagcggcgctggtaaagggttgttccacatgcaccgggccgaacgtcacaatgccgagttccactctttttaaagccagcggatcagcaagcagttcatcacgaaaggtaaccaatccggcgttaagttcattaataggtctaccgttcatagaaccagaaacatccagcagcaaaatgcaggggcaacgtggttccgggttactggcaaaatcgctggtggcaaacgtgatttgttcgctcataagaaatcctttcttagagaattatcgaggtccggtatcataccgactgcaataatgaaataagagcaaacgaagaaactttcagaattaggcccggcggcgcagaaaattttgctattcgcctcgcaagaacggagagccgtcgattgacactaagggcggagtgacataatttcaggagtgagggttagggagaggtttccccctccccctggtgttcttagtaagcctggaagctaatcactaagagtatcaccagtatgatgacgtgcttcatcataaccctttccttattaaaagccctcttctccgggagaggctttcccgtttcagcgtcccgctgaaatcatcggcttacctcctttcgccctgaatgcagtctatcgctaacgcgtgaataaaatagtttcctctgtgattattgcgtaacgactcgcaaagaatatttgctggcaggatcgcagactacaaagcctgcggattgacaatcttatcgtgaagacatactttcaggagtgagggtagagcggggtttcccccgccctggtagtcttagtaagcggggaagcttatgactaagagcaccacgatgatgagtagcttcatcatgaccctttccttatttatggccccttcctcgggaggggctttcccgtttcagcgtcccgctgaaatcgtcggcttacctcctttcgccatgcaagcagtctatcgctaacgcgtagataaaatagtttcctgtgttattactggatgcgtgctcgcaaatgtgcccgtcattcagacgattccagacagtgtttcataattcctccatttttctcccttattggctggctacactagtatcattccgcgaaacgtttcaggaagagaaactcttaacgatgaaaggtagttataaatcccgttgggtaatcgtaatcgtggtggttatcgccgccatcgccgcattctggttctggcaaggccgcaatgactcccggagtgcagccccaggggcgacgaaacaagcgcagcaaagcccagcgggtggtcgacgtggtatgcgttccggcccattagccccggttcaggcggcgaccgccgtagaacaggcagttccgcgttacctcaccgggcttggcaccattaccgccgctaataccgttacggtgcgcagccgcgtggacggccaactgatagcgttacatttccaggaaggccagcaggtcaaagcaggcgatttactggcagaaattgaccccagccagttcaaagttgcattagcacaagcccagggccaactggcaaaagataaagccacgcttgccaacgcccgccgtgacctggcgcgttatcaacaactggcaaaaaccaatctcgtttcccgccaggagctggatgcccaacaggcgctggtcagtgaaaccgaaggcaccattaaggctgatgaagcaagcgttgccagcgcgcagctgcaactcgactggagccggattaccgcaccagtcgatggtcgcgttggtctcaagcaggttgatgttggtaaccaaatctccagtggtgataccaccgggatcgtggtgatcacccagacgcatcctatcgatttagtctttaccctgccggaaagcgatatcgctaccgtagtgcaggcgcagaaagccggaaaaccgctggtggtagaagcctgggatcgcaccaacagcaagaaattaagtgaaggcacgctgttaagtctagataaccaaatcgatgccactaccggtacgattaaagtgaaagcacgctttaataatcaggatgatgcgctgtttcccaatcagtttgttaacgcgcgcatgttagtcgacaccgaacaaaacgccgtagtgatcccaacagccgccctgcaaatgggcaatgaaggccattttgtctgggtgctgaatagcgaaaacaaggtcagcaaacatctggtgacgccgggcattcaggacagtcagaaagtggtgatccgtgcaggtatttctgcgggcgatcgcgtggtgacagacggcattgatcgcctgaccgaaggggcgaaagtggaagtggtggaagcccagagcgccactactccggaagagaaagccaccagccgcgaatacgcgaaaaaaggagcacgctcctgatgcaggtgttacccccgagcagcacaggcggcccgagccgcctgtttattatgcgtcctgtggccaccacgctgctgatggtggcgatcttactcgccgggattatcggttatcgcgccctgcccgttagcgcgctgccggaagtggactatccgaccattcaggtggtcacgctctacccaggtgccagcccggatgtcatgacctctgccgttaccgcgccgctagaacgccagttcgggcagatgtctggcctgaaacagatgagcagccaaagttccggcggtgcgagtgttatcactttgcagttccagctaacattaccgctcgatgtcgccgagcaggaagtgcaggccgcgattaacgctgcgaccaacttgttgccgagcgatctgcctaacccgccggtttacagcaaagtgaacccggcagatccgccgatcatgacgctcgccgtcaccagtaccgccatgccgatgacgcaagtggaagatatggtggaaacccgcgtcgcgcagaaaatcagccagatttccggcgtcggcctggtgacgctttccggcggtcagcgtccggctgttcgcgtcaaacttaacgctcaggcgattgccgccctcggcctgaccagcgaaaccgtgcgcaccgccattaccggcgctaacgttaacagcgcaaaaggtagcctcgacggcccttcccgtgcggtcacgctttccgcgaacgaccagatgcaatccgccgaagagtatcgccagctaatcatcgcctaccagaacggcgcgccaattcgtctgggcgatgtcgcaactgtagagcaaggtgcagaaaacagctggctcggcgcgtgggcgaacaaagaacaggccattgtgatgaatgttcagcgccagcccggtgctaacattatctccaccgccgacagcattcggcagatgctgccacagctcactgagagtctgccgaaaagcgtgaaggtgacagtgctttccgatcgcaccaccaatatccgcgcatccgtcgatgatactcagtttgaattgatgatggctatcgcgctggtagtcatgattatctacctgtttttgcgcaatattccggcgaccatcattcccggtgttgctgtaccgctgagcttaatcggcactttcgcggttatggtgtttctcgattttagtatcaataacctgacactgatggcgttaactatcgccaccggattcgtggtcgatgacgccatcgtggtgatcgaaaacatttcccgctatatcgaaaaaggcgaaaaaccgttggcggcggcgctcaagggcgcaggtgaaatcggctttaccattatcagcctgaccttcagtctgattgcggtgttgatcccactgctgtttatgggcgatatcgtcgggcgactgttccgcgaatttgctattaccctggcggtagcgattttgatcagtgcggtggtgagcctgaccctgacaccgatgatgtgcgcgcggatgctcagccaggagagcttgcgtaaacagaaccgcttctcccgtgccagcgaaaaaatgttcgacaggataatcgccgcctatggtcgtggactggcgaaagtgctgaatcatccgtggctgaccttaagcgtggcactcagcacgctgctgcttagcgtgctgctgtgggtgttcattccgaaaggtttcttcccggtacaggacaatggcattattcagggcactttgcaggcaccgcaatccagctcctttgccaatatggcccagcgacaacgccaggtcgcggacgtgattttgcaggatccggcagtgcaaagcctgaccagttttgttggcgttgatggcactaacccgagcctgaacagtgcacgtttacaaatcaacctcaaaccgttggatgaacgtgatgatcgggtgcaaaaagtcatcgcccgtctgcaaacggcggtagataaagtgccgggcgtcgatctcttcctgcaaccaacgcaggatctgactattgatactcaggtcagccgcacccagtaccagtttaccttgcaggccacgagtctggatgcgctcagtacctgggtgccacagttgatggaaaaactccagcaactgccacagctttctgatgtctccagcgactggcaggacaaagggctggtggcgtatgtcaatgttgatcgcgacagcgccagccgtctggggatcagcatggcggatgtcgataacgccctgtacaacgcgtttggtcagcggctgatttccactatttatactcaggccaaccagtatcgcgtggtgctggagcacaacaccgaaaataccccaggcctcgcggcgctggataccattcgcctgaccagcagcgacggcggcgtggtgccgctaagcagtattgccaaaattgagcagcgttttgcgccgctctccatcaaccatctggatcagttcccggtaacgaccatctcctttaacgtgccggataactatagcctgggcgatgcggtgcaggcgattatggacaccgaaaagacgctgaatctgccggtggatatcaccacgcagttccagggcagcaccctcgccttccagagcgcgctgggcagcactgtctggctgattgtcgcggcggtggtggcgatgtatatcgtgctcggcattctgtacgagagctttattcacccgatcaccattctcagcacgctacccaccgcaggggttggcgcactgctggcgttgctgattgctggtagcgaactggatgtgattgcgattatcggcattattttgctgatcggtatcgtgaagaagaacgccatcatgatgatcgacttcgcgctggctgctgagcgcgagcaaggcatgagcccgcgcgaggcaatctaccaggcttgtctgttgcgttttcgtccgatcctgatgaccactctggcggctctgcttggcgcgctgccgctgatgttgagtaccggggtcggcgcggaactgcgtcgtccgttaggtatcggcatggtcggcggtctgattgtcagccaggtgctgacgctgtttaccacgccggtgatttatttgctgttcgaccgcctggcattgtggaccaaaagccgctttgcccgtcatgaagaggaggcgtaagtgaagttttttgccctcttcatttaccgcccggtggcgacgattttactgagcgttgccattaccctgtgcggcatactgggcttccgtatgctgccggtcgccccgctgccgcaggtcgattttccggtgattatcgtcagcgccagcctgcccggtgcgagtccagaaacaatggcgtcttccgttgccacgccgctggagcgcagtcttgggcgcattgccggagtcagtgaaatgacctccagcagtagcctcggcagcacgcgtattattttgcagtttgattttgaccgggatatcaacggcgcagcgcgtgatgtgcaggcggcgatcaacgctgcacaaagtttgctgcccagtgggatgcccagccgcccgacctatcgcaaagcgaacccgagcgatgcgccaattatgatcctcacgctgacgtccgatacttatagccagggtgaactgtacgatttcgccagcacgcagctggctccgacgattagccaaatcgacggtgttggtgatgtcgatgtcggaggcagcagtctgcccgccgtacgcgtcgggctgaatccgcaggcgctgtttaatcagggcgtgagcctggacgacgtacgcaccgccgtcagcaatgccaacgtgcgtaaaccgcagggcgcgctggaagatggcactcaccgctggcagatccagaccaatgatgagctaaaaaccgccgctgaatatcagccgttgattattcactacaacaacggcggcgcggttcgtctgggcgatgtggcgacggtgaccgacagtgtgcaggatgtgcgcaacgccgggatgaccaacgccaaaccggctattttactgatgatccgcaaactgccggaagccaatattatccagacggttgacagcatccgggcaaaattaccggagttgcaggaaaccattccggcggcgattgatctgcaaattgcccaggatcgctcccccaccattcgcgccagcctggaagaagtcgagcaaacgctgattatcagcgtggcgctggtgattctggtggtgtttttattcctgcgcagcggtcgcgccactattattcccgccgttagcgtgccggttagcctgattggtacgtttgcggcgatgtacctgtgcggattcagtctcaataaccttagcttaatggcgctcaccatcgctactggtttcgtggtggatgacgccatcgtggtgctggaaaacattgcacgtcatctggaagcgggaatgaaaccgttgcaagccgcactgcaaggtactcgcgaagtcggttttacggtgctgagcatgagtctgagtctggtggcggtgttcctgccgctgctgttgatgggcggattgccgggccgactgttacgcgaatttgccgtgacgctttctgtcgccattggtataagcttgctggtttctctgacattaacgccaatgatgtgtggctggatgctgaaagccagcaagccgcgcgagcaaaagcgactgcgtggttttggtcgcatgttggtagccctgcaacaaggctacggcaagagtctaaaatgggtgctcaatcatacccgtctggtgggcgtggtgctgcttggcaccattgcgctgaatatctggctgtatatcagcatcccgaaaaccttcttcccggagcaggacactggcgtgttgatgggcgggattcaggcggatcagagtattagctttcaggcgatgcgcggtaagttgcaggatttcatgaaaattatccgtgacgatccggcagtggataatgtcaccggctttacaggcggtagccgagtgaacagcgggatgatgtttatcaccctcaagccacgcgacgaacgcagcgaaacggcgcagcaaattatcgaccgtctgcgcgtaaaactggcgaaagaaccgggggcgaatctgttcctgatggcggtacaggatattcgcgttggtgggcgtcagagcaacgccagctaccagtacacgttgttatccgacgacctggcggcactgcgagaatgggagccgaaaatccgcaaaaaactggcgacgttgccggaactggcggacgtgaactccgatcagcaggataacggcgcggagatgaatctggtttacgaccgcgacaccatggcacggctgggaatcgacgtacaagccgccaacagtctgttaaataacgccttcggtcagcggcaaatcagcaccatttaccagccgatgaaccagtataaagtggtgatggaagtggatccgcgctatacccaggacatcagtgcgctggaaaaaatgttcgttatcaataacgaaggcaaagcgatcccgctgagctatttcgctaaatggcaaccggcgaatgccccactaagcgtgaatcatcagggattaagcgcggccagcaccattagctttaacctgccgaccggaaaaagcctcagcgacgccagtgcggcgatcgatcgcgcaatgacccagcttggtgtgcctagcacggtgcgcggcagttttgccggcacggcgcaggtgttccaggagacgatgaacagccaggtgatcctgattatcgccgccatcgccacggtgtatatcgtgctgggtatcctttacgagagttacgtacatccgctgacgattctctccaccctgcccagcgcgggcgttggagcgctgttggcgctggagctgttcaatgccccgttcagcctaatcgccctgatagggatcatgctattaatcggcatcgtgaagaaaaacgccattatgatggtcgattttgcgcttgaagcccaacggcacggtaacctgacgccgcaggaagctattttccaggcctgtctgctgcgttttcgcccgattatgatgactaccctggcggcgctgtttggtgcgctgccgctggtattgagcggcggcgacggcagcgagctgcggcaacccctggggatcaccattgtcggcggactggtaatgagccagctccttacgctgtataccacgccggtggtgtatctctttttcgaccgtctgcggctgcgttttagccgtaaacctaaacaaacggtaaccgagtaaatgacagatcttcccgacagcacccgttggcaattgtggattgtggctttcggcttctttatgcagagcctggacaccaccatcgtaaacaccgcccttcccagtatggcgcaaagcctcggggaaagtccgttgcatatgcacatggtcattgtctcttatgtgctgaccgtggcggtgatgctgcccgccagcggctggctggcggacaaagtcggcgtgcgcaatattttctttaccgccatcgtgctgtttactctcggtagtctgttttgcgcgctttccggcacgctgaacgaactgttgctggcacgcgcgttacagggcgttggcggcgcgatgatggtgccggtcggcagattgacggtgatgaaaatcgtaccgcgcgagcaatatatggcggcgatgacctttgtcacgttacccggtcaggtcggtccgctgctcggtccggcgctcggcggtctgctggtggagtacgcaagctggcactggatctttttgatcaacattccggtggggattatcggtgcgatcgccacattgctgttaatgccgaactacaccatgcagacgcggcgctttgatctctccggatttttattgctggcggttggcatggcggtattaaccctggcgctggacggcagtaaaggtacaggtttaagcccgctgacgattgcaggcctggtcgcagttggcgtggtggcactggtgctttatctgctgcacgccagaaataacaaccgtgccctgttcagtctgaaactgttccgtactcgtacctttagcctgggcctggcggggagctttgccggacgtattggcagtggcatgttgccctttatgacaccggttttcctgcaaattggcctcggtttcagcccgtttcatgccggactgatgatgatcccgatggtgcttggcagcatgggaatgaagcgaattgtggtacaggtggtgaatcgctttggttatcgtcgggtactggtagcgaccacgctgggtctgagcctggtcaccctgttgtttatgactaccgccctgctgggctggtactacgttttgccgttcgtcctgtttttacaagggatggtcaacagcacgcgtttctcctccatgaacaccctgacgctgaaagatctcccggacaatctggcgagcagcggcaacagcctgctgagcatgattatgcaattgagcatgagtatcggcgtcactatcgccgggctgttgctgggactttttggtagtcagcatgtcagcgtcgacagcggcaccacacaaaccgtctttatgtacacctggcttagcatggcgttgatcatcgcccttccggcgttcatctttgccagagtgccgaacgatacgcatcaaaatgtagctattagccggcgaaaaaggagcgcgcaatgaagttctggcgacccggtattaccggcaaactgtttctggcgattttcgccacctgcattgtcttgctgatcagtatgcactgggcggtgcgtatcagttttgagcgtggctttattgattacatcaagcatggtaatgaacagcgattacaactgttaagtgatgcgcttggcgagcagtatgcgcagcatggcaactggcgcttcctgcgcaacaatgatcgctttgtctttcagatcctgcgtagttttgaacacgataatagcgaagataaacccggcccgggtatgccaccgcacggctggcgtacccagttctgggtggttgatcaaaacaacaaagtgctggttggtccgcgagcgccgattccacctgacggtacacggcgacccattctggtcaacggtgcggaagttggcgcggtgatcgcctcccccgttgagcggttaacgcgcaatactgatatcaatttcgataaacaacagcggcaaaccagctggttgattgtcgccctggcaacgttactcgcggcacttgccacttttctgctggcgcgcggtttactggcaccggtaaaacgacttgtcgatggcacgcacaaactggcggcgggcgatttcactacccgcgtaacgcccaccagtgaagatgaactgggcaaactggcgcaagacttcaaccagcttgccagcacactggagaaaaaccagcaaatgcggcgcgattttatggccgatatttctcacgaactgcgtacgccattagcggtgctgcgcggtgaactggaagccattcaggatggcgtgcgtaaattcacgccggagacggtggcgtctttacaggcggaggtcggtacactgaccaaactggttgacgatctccatcagttgagcatgtctgatgaaggcgctctcgcctatcaaaaagcaccggtagatttgatcccactgctggaagtggcgggcggcgcatttcgcgaacgattcgccagtcgtggcctgaaactgcaattttccctgccagacagtattaccgtatttggcgatcgcgaccgtttaatgcagttattcaataacttactggaaaacagcctgcgctacactgacagcggcggcagcctgcaaatctctgccgggcagcgcgacaaaacggtgcgcctgacctttgccgacagtgcgccaggtgtcagtgacgatcagctacaaaaattgtttgaacgtttttatcgcaccgaaggttcccgcaaccgtgccagcggcggttccgggctggggctggcgatttgcctgaacattgttgaagcacataatggtcgcattattgctgcccatagcccttttggcggggtaagcattacagtagagttaccgctggaacgggatttacagagagaagtatgaccgagttaccaatcgacgaaaacacaccgcgtattttgatcgtggaagatgaaccgaagctggggcagttgctcattgattatctgcgtgctgcgagctatgcgccgacgcttatcagccacggcgatcaggtactgccgtatgtgcgccagacaccaccggatctgatcctgttagatctgatgctccctggcaccgatggcctgacgctgtgccgggaaattcgtcgtttttctgacattccgatcgtgatggtgacggcaaaaatcgaagagatcgatcgcctgctggggctggagattggcgcagatgattatatctgtaagccgtacagcccacgggaagtggtagcgcgcgtcaaaaccattttgcgccgttgcaaaccgcagcgcgagttgcagcaacaggatgctgaaagcccgttgattatcgacgaaggtcgttttcaggctagttggcgcggtaaaatgcttgacctgacgcctgcggaatttcgtctgctgaaaacgctctctcacgaaccaggaaaagtgttctcccgcgagcaattgctcaatcatctttatgacgactaccgcgtagtaaccgaccgcaccatcgacagccacattaaaaacctgcgccgcaagctggaatctctcgacgccgaacagagttttatccgcgccgtttatggcgtcggttaccgctgggaagccgacgcctgccgcatcgtttaattttagcgacattattttgttagccggagatggcgttcagaccagatccggcaacattatcccacgcatggtcagcaaactgacattatctctccgccctggcaggcatcagaaaatcgctcatactttaatcggtaaacagcacctttagaatcctgtcgtttgttttcgatttcaaaatataatgaaattatttgtttttaaatatcgagataacgatcacaaaaacgacaatatgaaaattattcgaggagtgaaaggcaaaaaaacggcctcccgatagggaagccgtagcaaagtgcgcgtgtttttatgccggatgcggtgtaaacatacgtggcagtgctatgtaggcatgataagacgcttcagcgtcgcatcaggcataggttgccggatgcagcgtaaacgccttatccgtcctacggggtggtgttgttcgtataaggcgtatcaggcgatagtaattttgctatcgagataaacgtcctgcacggcgttaatcagtttcacgccgtcagccatgcttttcttgaacgctttacgtccaagaatcagccccattccgcctgcgcgtttgttgataaccgcagtacgcactgcatcgctgaggtcagtttcaccgcccgcagcaccgccggagtttatcaacccagcccgacccatatagcagttagctaactgataacgcaccagatcaatcgggttttcgctggtcaatttgctgtaaacacgatcgtcggtgtaaccgtaattaattgctttatagccgccgttattttccgccattttttgtttgacgatatctgcaccgatggttgccgccagatggtttgcctgaccggtcaggtcggcggaaacatggtaatcaacgccatctttcttaaaggcggagttacgcaaataggcccacagcactgtcaccatacccagctcgtgcgcacgttcaaaagccgcagaaatttcttcaatctggcgacgactctcttcgctgccaaaatagatagtcgcaccaaccgcaaccgcgcccatgttgaacgcctgctccacgctggcatacagcgtttgatcgtaggtattcgggtaacttagcgtctcgttgtgattaagtttgacgaggaatggaatgcgatgcgcataacgccggcttacgctcgccagcacgccgtaagtactcgccacacagttacagcccgcttcgatcgccagttcaacaatgtttttcgggtcaaagtagagcgggttagcagcaaaactagctccggcagagtgctcaacgccctggtcaaccggcagaatagaaagatatcctgtgccagccagacgcccggtgttgtacaacgtctgcatattacgtaacaccgctggcgggcgattattgtcaatcattacgcggtctacgtagtcatgtccggggagataaagctggtcagaaggaattgtcatacaacggtgctgtaaaaggttgtcggcgtctttgccaagcaactgcgcaatatctgtcattactatgctcccgtaaattccgattggatatcggctatggattgtcctggcccgccttttgcgggcaatcataatcctggtcgttacgggcgagtttttccatcttttggatgttttttcagcgttttctgttggctcgattcatcagaaaaaatgttagcgcggtcaagttttcaccgcaaaggtatttaaaaggtattattaagtggtattgtcatcgcgtaccttacattacctgtcatgaaggaattaaaagatgaaaacaacagcaaagctgagcttcatgatgtttgttgaatggtttatctggggcgcgtggtttgtgccattgtggttgtggttaagtaaaagcggttttagtgccggagaaattggctggagctatgcctgtaccgccattgcggcgatcctgagcccaattctggttggctccatcactgaccgctttttcagcgcgcaaaaagtgctggcggtattgatgttcgcaggcgcgctgctgatgtatttcgctgcgcaacagaccacttttgccgggttcttcccgttactgctggcctacagcctaacctatatgccgaccattgcgctgactaacagcatcgcttttgccaacgtgccggatgttgagcgtgatttcccgcgcattcgtgtgatgggcactatcggctggattgcctccggtctggcatgtggtttcttgccgcaaatactggggtatgccgatatcagtccgactaacatcccgctgctgattaccgccggaagttctgctctgctcggtgtgtttgcgtttttcctgcccgacacgccaccaaaaagcaccggcaaaatggatattaaagtcatgctcggcctggatgcgctgatcctgctgcgcgataaaaacttcctcgtctttttcttctgtagtttcctgtttgcgatgccactagcgttctattacatctttgccaacggttatctgaccgaagttggcatgaaaaacgccaccggctggatgacgctcggccagttctctgaaatcttctttatgctggcattgccgtttttcactaaacgctttggtatcaaaaaggtattattgcttggtctggtcaccgctgcgatccgctatggcttctttatttacggtagtgcggatgaatatttcacctacgcgttactgttcctcggtattttgcttcacggcgtaagttacgatttttactacgttaccgcttacatctatgtcgataaaaaagcccccgtgcatatgcgtaccgctgcgcaggggctgatcacgctctgctgccagggcttcggcagtttgctcggctatcgtcttggcggtgtgatgatggaaaagatgttcgcttatcaggaaccggtaaacggactgactttcaactggtccgggatgtggactttcggcgcggtgatgattgccattatcgccgtgctgttcatgatttttttccgcgaatccgacaacgaaattacggctatcaaggtcgatgatcgcgatattgcgttgacacaaggggaagttaaatgaaaacagaacgtattctcggtgctctttatgggcaggcgttaggggatgcgatggggatgccctccgagctttggccacgcagccgcgttaaagcacactttggctggattgaccgttttcttcctggaccaaaggagaataacgcggcctgttattttaaccgcgccgaattcaccgacgataccagcatggcgctgtgtctggcggatgcgttactggaacgtgaaggcaagatcgatccggatctgattgggcgtaatattctcgactgggcgctgcgtttcgacgcctttaacaaaaacgtactaggtccgaccagcaagattgcgcttaacgccattcgcgacggtaaacccgttgctgaactggaaaacaacggcgtgaccaacggcgcagcgatgcgcgtcagcccattaggttgtttgcttccggcgcgtgatgttgattcctttattgatgatgtagcgctggcgtccagcccgacccataaatccgatctggcggttgcaggcgcggtagtcatcgcatgggcgatttctcgtgccattgacggagaaagctggagtgcgattgttgattccctgcctagtattgcgcgacatgcacagcaaaaacgcatcactacgttcagcgccagtctggcggcgcggctggagattgcgctgaaaattgtgcgcaatgccgacggcaccgaatccgccagcgaacagctttaccaggtcgttggcgcaggtaccagcactattgagtccgttccgtgcgccattgcgctggttgaactggcacaaaccgacccgaatcgctgcgccgtcctgtgcgctaaccttggcggcgacacagacaccatcggtgctatggcgacggcaatttgcggcgcgttgcatggcgttaacgctatcgatcctgcgttaaaggcggaactggatgcggtaaatcagcttgatttcaaccgctatgccacagcgctggcgaaatatcgtcaacaacgggaggcggtatgagcggcgctcgattacacacgctgctgcctgaattaaccacgcgtcagagcgtgatggtcgtcggcgcggcggtcattgacgtgatcgccgacgcttatgccctcccctggcgtgggtgcgatatcgaactgaaacagcagagcgttaacgttggcggctgcgcactgaatattgccgtggcgttaaagcgcctcggcatcgaagcgggtaatgccttgccgctcggtcagggcgtgtgggcggagatgattcgcaaccggatggcaaaagagggcttaatcagcctgatcgataacgccgaaggtgataacggctggtgtctggcgctggttgagccggatggcgaacgcacttttatgagtttcagcggtgttgaaaatcagtggaatcgccagtggctggcgcgattaaccgttgcgcctggcagcctgctctatttttccggttatcaactggccagcccctgcggcgaattgttagtggaatggctggaagagctgcaagacgtgacgccgtttatcgattttggcccacgtattggcgatatcccggatgcattactggcgcggatcatggcctgtcgacctttagtgagcctcaatcgtcaagaggctgagattgccgccgaacgttttgctttatccgcagagataacaacacttggcaagcaatggcaggagaaatttgccgcgccgttgatcgttcgtctcgataaagaaggcgcatggtatttcagcaacgacgcttctggctgcattccggcatttccaacgcaagttgtcgacaccattggggcgggcgacagtcatgccggtggcgtacttgccgggctggcctctggtctgccactggcggatgccgtattactgggcaatgcagtggcgagctgggttgtcgggcatcggggcggtgattgtgcgccaacgcgcgaggaactactcctcgcacacaaaaacgtataattactcctcgcacacaaaaacgtatagatcgctgcgacagtggctaatgctgtactcaataggccgttgctgttggtcaagcgccacttgcttgatcaccagcaccggtattttgctatctaactgaatatgactctgaaactcggcatccggcatccgggcgctaacgcgggaacgcgtacgttgtgggtaaatgtgctggctgcggaaatagtcataaagactaatcccgatggcatcaacatcatgaattaaatgcgccggaacccagctttcctcaatgcttaccgcttcttcatcgacatagcgaatacgcttaagcaaaaagacatcacttcctgcttcgaccgccagctgctgcgcgacttcttcgggacatttcacgacacgcttgttaacccatagcgtatcgggctttttcccgcgcaataccacctgctgagaaaaacctcgcgcttctttcaagctgtattcgaagatgttgttgatctgcgtgccgtaaccgcggctacgcgtcaccacaccctcttcttccagcgcctgcatcgccttgcgcaccgtaatgcggctaacgccggttaactgacttaaatcacgttcaccgggcaaaatattgccatgctccagcaccccgctgcgcacggcattttttaccgtttcggcaaacttaatataaagcggcgtgttatccgccgctaaaatacgctcgttcagttgggcaatcagctgggtatgcgcttgttccatttgtctttttcctgccggggagtctggtgggagtatatcactgcttcttatttaaggcgtttctttaatcccatcaacgaatgcctgcaactcctccaccgtgccattaaatacattaaaatccaccggaccattgatgccatctacctgtccacggtcggaatgctgccagaagcgccaggccattccgtcattgtccggacgacgttgatagtagtgagccacccaccacggatattcattgaaatagcccgccagattggtgtgataaaaaacggctccactgtaaataatcggctttttccccgtacttttttcgaccatttttagccactgacttacccgcttgcgtaattcttttgcgcttaattttccccgttcttctacgtccagcacggcagggaaatcgccttgactgaaatccaccgtttgcagaaataatctcgcctgaacactagcggatacgctcggggagaaataatgatacgccccacgcagcaggccattttcgcggcttagttgccagttacggctaaaataggggtccaccagcttttcgccttccgtcgccttaataaaagcaaactgtaagcggataccattgtcgcgcatttttgccacccgctgccagtcgatccgctcctgccagcggctaacatctattccgtgaatggtgtaactggcaggaatgcgaatagcgaaagatttaaccgggcgataaccgtagaagtggatgtagtctgtaatctgaactgctgtgctatagaaaaaattcaccgtctgacgcggataaattgcaacgatggaaattagcccaagagcgcataatagagaggtgagtttttttcgactggtaattcttagctgcattggtttcatccctgaatgtcagtgccaaaggctgacaataaccaaagcagctatagtacggcgctcaccaccaggcgtggaagtggtgaaccggaccaataccgtgaccaacttccagcgtgtcggcctgggctaacgcgctactaagccagctttttgcctcctgtacggtgtcagcccagtttgtatggcgcgggcgtagtgcagccaacgccgcagagagtgtacaaccagtgccgtgggtgtttttggtcataatgcgcggtgcggtaaaccgttgttcaccctcgcgggtaaacagccagtccgggctttgctcatcatccagatgaccacctttcattagcactgcgccacagcccatcgccaacaggcttcgcccttgttccagcatttcctgttcggtgcgcgcgtgtggcgcgtcgagcaaggcggcagcttcgggcaagtttggcgttattaaactaacctgtggcaataatcgactgcgcagcgtagcaaccgcgctaggactaagcagcgggtcgccgctttttgccagcataacggtgtcgagtaccacgttttggatctgataacgttgcaaccgttctgccaccgcttcaacaatatcggtttccgccagcataccgattttagtggtatcgattcgcacatcgctgaacacgctatcgagctgggcggcgacaaaatcaggctcaatgcgatacacgctctgtacgccacgggtattttgcgccaccagtgcagtaataacactgcaaccataagcgccaagtgcgctgaaggttttaagatcggcctgaatccccgcaccaccactcggatcagtaccggcaatcgtcagagcgttaattcgtttcatgcctgcacctcctgcgtcaattgccagagcgcatcaaggaaatgtggaacaaaactgcctggcccctcgcttctggcgactgcgcgttctccggcttgtttcatccagtgacaggcagatgcgacattttccagcgtatcgcctggtaacgcacagcaggcagcgacaaccgcgcttaatgcacagccagttcctaccactttggtcattaacggatcaccaccgtgaataccaatgatacgatgtccatcggtaacataatccatctcgccagtgaccacgacgattgcgccagtttcccgtgccagtgtttgtgcagcgggtatcgcgttagctgcggcgtcagtggtatccactccccgtccgccattagcaatgccagctaatgccatgatttcgctagcattaccacgtatcgctgccggtttaaaagataaaagttcatgacaaaaatggcggcgataatcgagcgcacccaccgctactggatcaagcgtccagggtgtttgagagctttttgcttgctcaacggcagcacgcatcgcctgagcgcgtggctgcgtcagtgtgccaacgttaatcaacaaggcactggcgatagccgcaaactgactggcctcttcggtttcgataaccatcgctgggcttgcaccgagcgccagcaaggtattggcggtaaaggtttgcaccacatcattggtcatgcagtgcacaagaggggaatgttggtgaaaaaggtgtaacgcgtgcgcagattgcgcactacccagcaggtcgacttgcatagtttgctcctgccataacgtgaagaagcaatgacctggtggtccgtgacttccctacgctggcattatccagatcaggtgatacgggtatttctcagccttcacgcagaagggcaccccgagtcgtttggttgcgatgataaatcgcagaggaggatggtaatgtccagcgcacgcgttgtaaacgaggaaaaacggcagttttacaatcgcgttaataaattatttgatataactatccagcaccttcagaacgacatccagatcttcttcacgttttagctcatccccctggtgaacgatgtgttccgtcagatgacctttaatcacttcccgcatcagaccgtttaccgcgccacggatagcagcaatctgttgtaaaactgcagcgcattcgtgcggctcgtcgagcattttcttgagcgccacgacctggccctgaatcttactggcacgcgctttcagtttctgtttatcacggattgtatgagacatggcaacacctggttaacaagaatatgaaaaatcatagcactattaatctactggggggtagtatcaggtactgggggggagtagaatcagattgccgaattaatactaagaattattatcatgaccgaatttacaactcttcttcagcaaggaaacgcctggttcttcatccccagcgccatcttacttggtgcgcttcatggcctggaaccagggcacagtaaaacgatgatggcggcgtttatcatcgccatcaaaggcaccattaaacaagcggtgatgctcggactggcagcaactattagccataccgcagtggtctggttaattgcctttggcgggatggtgatcagcaagcgctttactgctcaaagtgcagaaccgtggctccagctgatttccgcagtgatcattattagcaccgcgttctggatgttctggcgtacctggcgcggcgaacgcaactggctggagaatatgcacgggcatgattatgagcatcatcatcacgatcacgaacatcaccacgaccatggacatcatcaccatcacgaacatggcgagtatcaggatgcccatgcacgagcccatgccaatgacattaaacgacgctttgatggtagagaggtcaccaactggcaaattttgttatttggcttaaccggtggccttatcccctgcccggcagcaattaccgtgctgttgatatgcattcagttgaaagccctgacactgggcgcaacactggtcgtcagtttcagcattggcctggcgttaacgcttgtcaccgtaggcgttggcgcagcaatcagcgttcagcaggtcgcaaaacgctggagcggatttaacactctcgctaaacgcgccccctatttttccagtctgttgattggcttagtcggtgtgtatatgggcgtacatggcttcatgggcataatgcgataactcaatcctttaggcttgcatgttatcttcagcccaggatgattcttaaatcagctatttccgctgactctctgctcgctaaggatgcttttagggcatcctttcatttacactttttacgaaatcatgggatcactaacaaaatatcgcttgtcagttatattgtatggcaggaaagatatgcgactgatattacagatccccaaagtggagagtttatgaccattaaaaataagatgttgctgggtgcgcttttgctggttaccagtgccgcctgggccgcaccagccaccgcgggtagcaccaataccagcggaatttctaagtatgagttaagtagtttcattgctgactttaagcatttcaaaccaggggacaccgtaccagaaatgtaccgtaccgatgagtacaacattaagcagtggcagttgcgtaacctgcccgcgcctgatgccgggacgcactggacctatatgggtggcgcgtacgtgttgatcagcgacaccgacggtaaaatcattaaagcctacgacggtgagattttttatcatcgctaaaaaaagccccctcatcatgagggggaaatgcagacaccttgttattttttattattagccacttgctcgtcttgcttgttattagtcgtatttcacgttgattaatgcggttgcctccagtgcgccagatttaactttgtttgtatcgtagacgtagtaactggctgttatcggaatactaaccgttgtatctgtaagtttactcttcgccgcaacttcctttaaatttgtatatcctttactgctgttagtgatatttaaaagtgtgactgggctaccattactttcaagaataaatcctacgccattatcttccgcacctttcagtattgtgttgctgttggttaacaagtcagaactacttaaatacacctgcattttccgacttgtttgattttgttgacctaataaatttttacaacgcagaataatatccccttgtttactatttattgttgctttgttacctgtggctggtaattgactaacgggaatactgtctaaagtaattaataaatcgtccggtttgcaggttgtggttatcgggttgtaactcaatgtcagattaaaggaatagacacctgcattttgtgccaatgcatttctgtagctatttacacatgcatcccaactcttgccacctaataaacacagtagaaattgtactgcggcactcccgcgtgtgctactactagcactggataatgtcgcaacaccattaatcatcacactaccgccgccccccgcagaaacattcacttttgcattactggccgcaggtgtcaccgtaacactataaccactggtgaaactggtctgattattactcaacgtgatgttgtttttattggtccattcaaaatgtaaatttaattttatggtatcgttataaagtccaacaataatatcgctcgggctcataggggtgatagtatttgtacttacgcaactgctatcattaaaattatgctcatatgtcgccatttgtgtttgagtaagtgcaaaatccccctgaacaaccaagttgtgctgaacagataactcactataacatgccgcatagctcacaggcataaccatcatcattaatataaatagcattatgcgaatttccatagaaccacctgactattactggcaaatataatttctactttcatcaatctctttaccgaaggtgattgtgcaactaagtccttgttgcttatcaattgccacattaacgcttggcggtacttcattggtgcgaataaataactgacttccctggccgacaacgccaatattatgaccatggatatcattgacttcataaccaaacgttaaactttgcccatctgctcttaacgcttttataaaccatggcttgcgctgatcggtatcaaaattaaccagtacaaccgcgccgcgataaggggcggcaattttccggttgccacgtaattctgcttcgctatcgctttggctcacatccagcatcaggtgattttcccgataaggtgtcattccgtcgtatatcaccactccattacggtttgttgtgcgatatttttgcccattgacataagcatctttaattcctggcgcattcatcacagcaaacgtttcggaaagacggttcgccagattaacgccaccgctccaggcgacaatgcccccactaacactggctccagcctgtcgataagtactgctctgactataactgccattcactgtcgcaaccggcgcgttccaggtcaaattcgccccagctgtcgtttcatttccctgatgttgatgactcaggttgacaccataattgaactgatcccgactccctactgttccacttaatcccgtattattactggcaaacccctgatcatcaaacgtcgtactgttagacatatatatttgccgacgaggcgtgctaacgtcatcaccccaatcaaagggaatgcttataaaaatattaaaacgtttctcttcatgatgattctcgtcataagcctggcttgccgcgagggtatagcttatccgtcgcaggttgttggaataactcaactgataatccttactactgccgctacgcccccagtaatctcgccataacgtacttaaactcacagacccccaaccttctggcaaactctggctcatattggcggaaaagctatttttgcggccaaaatcgttctggtaataatcggcaatgtcatagacatcgttttcatcacggcgataattatctttattgtttgcccaaacgtgatcgttaaatgtccggtaatcacggctgctataacgccaggccgccagaccaaaacgcgtgctcgtttggctcacaaatttgttgtaggcaatttgataactttgcccgtcaaacacatcgccgttgtcttgtttactatggctcttagtggcatcgacggaaatggcaccaatgcgtgtattccagccagcccccaaagtaaacgcgtaataattattcgcgaccatgctgccaccatacagcgtcaataaattattaaaaccatactgataacccgcctggacaaaatcactttgtttgctcgccccttcaatatggctacgacccgccgctaaatcatatttgctcacgccgggttgcagcatatttggcaccgctgcataaggcaccagataggtggttacgctgccgtccgcctctttcacgctgacatcaagatctgctccaccaccggccaactgcaaatctgtaatcgcgaacgggccaggaggaacctctttctgataaaccacaaaaccattctgttcaatagttaccagcgcgttactctgagcaatcccctgcacccgtggcgtaaaattttgtttgctgttaggcaacatctgcatatcacgaaacaaccgcacacctctgaagcgaacagaatcaaaaatatcgctacttgtgtacatatcacccacgcgaagcgtgccgagaagttgggcaaatccacgttccagatacagggtattgcttttccacacccctggattgttatttgttttactgaaactggcatcagaatgcagttgccaccccagtaaatttaacccgctgttaaaacgtacatatgtactcttgttattaccgctcgctttatagtcgctgtaatactgactcagataataagaggtataaaacgcattaataccccgctcccagttttccggtggaacatagccactttccagttcttccacccaggcctgcgggacactgaaatcgagacgaaaaaccccgatatcccaggtatagctcccaccctgaacaagttgctcaaatgttaaacattgcttaccgctggcgaagttatcgctattaatgcctaaccgcttgataacttctctacttaaacatgtttcttgcgggttgtctttaacaataatctcatatttcccgcgccattgcttattgacataaatatcgatgtcatactgccccggtaagggttgattatcatcaagacgaatatttgcaacctgctggtctttcattccacctatcataaaatgggtatcaaaggtttcttcagctgcataagcttcaatgccgagcaataacgctacgattgcacttgcaagtggggtcattctcaacataggcagctcctgcaattaaattttgtcactaatatagttgccatggtcatcgataatggtcagatgccagttatttgcattattacttttgacattaacactctgactttctaagggggcaatcataatagtttcataattgactttgacattattagctttgacatcgctaatcgtcacccaattagcactgtcattttttatcaccaaaccattgccactgcgatttaccagcaattttttaaatgtcgctttatttaccggagcaatacccgctggccggtaaaacaacttaattctgttttgcatcgcaaacttcagtgcattcttaccttcttgctctggactatttggtggaatatccagaacattcagataaaaaatgctttctttattagtgggcagtttattcggcataattttgatttttacttgctgcccggaatttgcccctatttttgccactggtggcgttaacatgaaaggaacctgaattttttctggtggtaaactcgtatcgccatcatcaatccacgcctgcagcaggctagaacggtttccctggttcatcaactgcaccatcacttctttattttctgccgggtaaataatgcgcgtcccgtagataacaattccggcatgtgcaggaaggaccatagaaaaaatgagtaaagataataatcctttcattttaatgcctcttaaattaaaaggccgccatgggatagcggccatgtttattacctggagaaacttacaattttatttattaatcctgcgccacacgcataaccagagaagataacacatcaccactttgcacactgttatctgtcagtttcaggtattttgctttaaacggaatagcatattgaccttccgctgttttataactctcaatgttaaaaggtgcagaaacatccaggacatcgctgttatcacctaaatagagatagtaacccacggtatcgttgctactggctatcgccttatcgttaccggttattttatcgttggtaatcaagctgagttttacaccagcaacttctttcgggcagctaatttttaacatgctgctggttacaccgactgcatcatcataggtagaatatttagctttaccttcaaagacactggttggtacagtcggcatattaatacttacactatcaccacccgcttcgaatttacacggagattctgcaatattccccttaatagttaatgttccggtatcaacgtctgcagcaaatactccagcgctcataaaaaaagaagaaaagacagcggcagcaataatactacgtttcataatatgttccttaataaaatttatttttggttgttaagagtctgtatctcttggaaacaaatttctcacatcaaaaaagttgccgcaatgtaaacacattgttttattgatttaaaacaaattaaccattgcaatataaatacaaaaaatatttaagagtattaactatttatcgcatctatcaattaatgtagatttatgtaaatggtattgttgatatcaataaaaaagccgaaatcatttatataaatgatttcggctttctaaatgcaattaaaatcaggttgccaaattaatcgtagcgatttaacacgattcgacgtttgctatcgctacctgcaacaaccacttctgtcgttacacctttgacggggctagaaaacagatgacgggtgtcaacattatacgttaactgaccacaatgctgttgaggttgaccattaaccatagccatactgcatgttgggggactgatcctgccattaatcgctaatgtggcagtctcactagagaatgcgggagaagccaatccataggcaagaaaaataattccactcagccaatacttattcattgaacgttatccctgtagtaaaggttatgcctggatagaatgagtgcataacaaactatagctgtacatccactacacagccacgaaggatgataatgaagcattgcctgtatgatcaatcgactttgtagagtttcggacgaaggtccgcagaatattcgcagtattaaataagtgttcattaatgcggcaaaaactaatacaccgcatcaatgtaacatctctgcggtgtatgaagaataaccagaatggttaataggcgttagaccgcgcggaaggaaatctcgcctggaatgacttcaccctgccagtagagctgagctgcaacgcggtcagccagctggcggtagatagcggtaaattcgctctccggacggctgataaccgttggcgtacctttatcgagatcctcacgtaaggagatgtgtaacggcatctgccccagcagctgtgtatggtatttttcagccagtttctctgcaccaccggtaccgaaaatcggttcatggtgaccacagttactgcaaatatgcacactcatgttctcgacaataccgagcaccggaacctcgactttctcgaacatcacaatgccttttttcgcatcgatcagcgcgatgtcctgcggggtggtgaccacgactgcaccggttactggaatgttttgcgccagcgtcaattgaatgtcaccggtgcctggcggcatatcaagcaccagatagtcgagatccggccacaaggtttcctgcaacatctgcattaacgccttgctcgccatcggtccacgccacaccatcgcattgtcgtcagtgaccagataaccaatactattggttgccaggccatgagacataatcggtgccatatgggtaccgtccgggctagttggacgctgattttctgcgcccaacattgttgggatacttgggccgtagatatcggcgtccagaatgccgactttcgccccttctgccgccagcgccagtgccaggtttaccgccgtggagcttttacccacgccgcctttaccggaactcaccgcgataatgttcttcacaccgttaattcccggctgattcttcacgcgtttcagagtggctatgttatggctcagtttccagtcgatagctttcgccccggtgatgcgcagcagttcggcgctacattgctcttttaactcttcgaacgcgctatgccagacaaacggcataaccagttccacatgcaacgtgtcgtccatccaggcgacatggtgcaacgctttcagcgtggtgaggttatgcttcagggttgggtgctgaaaattggccagtgtcccggcgaccattgcgcgcaaggcttctggacttttggcctgggattgttcgttcatcccgactccttttttgtatagataaaccatcagctgatagtttacctgaagaatatagagaagtacttacttaacattttcccatttggtactatctaaccccttttcactattaagaagtaatgcctactatgactcaagtcgcgaagaaaattctggtgacgtgcgcactgccgtacgctaacggcagtatccacctcggccatatgctggagcacatccaggctgatgtctgggtccgttaccagcgaatgcgcggccacgaggtcaacttcatctgcgccgacgatgcccacggtacaccgatcatgctgaaagctcagcagcttggtatcaccccggagcagatgattggcgaaatgagtcaggagcatcagactgatttcgcaggctttaacatcagctatgacaactatcacagcacgcacagcgaagagaaccgccagttgagtgaacttatctactctcgcctgaaagaaaacggttttattaaaaaccgcaccatctctcagctgtacgatccggaaaaaggcatgttcctgccggaccgttttgtgaaaggcacctgcccgaaatgtaaatccccggatcaatacggcgataactgcgaagtctgcggcgcgacctacagcccgactgaactgatcgagccgaaaagcgtggtttctggcgctacgccggtaatgcgtgattctgaacacttcttctttgatctgccctctttcagcgaaatgttgcaggcatggacccgcagcggtgcgttgcaggagcaggtggcaaataaaatgcaggagtggtttgaatctggcctgcaacagtgggatatctcccgcgacgccccttacttcggttttgaaattccgaacgcgccgggcaaatatttctacgtctggctggacgcaccgattggctacatgggttctttcaagaatctgtgcgacaagcgcggcgacagcgtaagcttcgatgaatactggaagaaagactccaccgccgagctgtaccacttcatcggtaaagatattgtttacttccacagcctgttctggcctgccatgctggaaggcagcaacttccgcaagccgtccaacctgtttgttcatggctatgtgacggtgaacggcgcaaagatgtccaagtctcgcggcacctttattaaagccagcacctggctgaatcattttgacgcagacagcctgcgttactactacactgcgaaactctctagccgcattgatgatatcgatctcaacctggaagatttcgttcagcgtgtgaatgccgatatcgttaacaaagtggttaacctggcctcccgtaatgcgggctttatcaacaagcgttttgacggcgtgctggcaagcgaactggctgacccgcagttgtacaaaaccttcactgatgccgctgaagtgattggtgaagcgtgggaaagccgtgaatttggtaaagccgtgcgcgaaatcatggcgctggctgatctggctaaccgctatgtcgatgaacaggctccgtgggtggtggcgaaacaggaaggccgcgatgccgacctgcaggcaatttgcagtatgggcatcaacctgttccgcgtgctgatgacttacctgaagccggtactgccgaaactgaccgagcgtgcagaagcattcctcaatacggaactgacctgggatggtatccagcaaccgctgctgggccacaaagtgaatccgttcaaggcgctgtataaccgcatcgatatgaggcaggttgaagcactggtggaagcctctaaagaagaagtaaaagccgctgccgcgccggtaactggcccgctggcagatgatccgattcaggaaaccatcacctttgacgacttcgctaaagttgacctgcgcgtggcgctgattgaaaacgcagagtttgttgaaggttctgacaaactgctgcgcctgacgctggatctcggcggtgaaaaacgcaatgtcttctccggtattcgttctgcttacccggatccgcaggcactgattggtcgtcacaccattatggtggctaacctggcaccacgtaaaatgcgcttcggtatctctgaaggcatggtgatggctgccggtcctggcgggaaagatattttcctgctaagcccggatgccggtgctaaaccgggtcatcaggtgaaataatcccccttcaaggcgctgcatcgacagcgccttttctttataaattcctaaagttgttttcttgcgattttgtctctctctaacccgcataaatactggtagcatctgcattcaactggataaaattacagggatgcagaatgagacactttatctatcaggacgaaaaatcacataaattcagggcagttgagcaacagggaaacgagttgcatatcagttggggaaaagttggcaccaaagggcaaagccagataaaaagtttttcagatgctgcggcagcggcaaaagcggagcttaagctgattgcggagaaggtgaagaaggggtatgtggagcaagcgaaggataattctttgcaaccttcccaaacggtaacgggctctctcaaggtagcggacttatccaccattattcaggaacaaccctctttcgtagcagaaacccgtgcgcctgacaaaaatacagatgctgttttaccgtggctggcgaaagatattgctgtcgtttttccgcccgaagttgtacacaccacgttaagtcatcgccgctttcccggagttcctgttcagcaagcagacaaattgccccaattacgtcgcttagcctgtagtgtgtcgcaacgggataataaaacagccacatttgacttcagcgcctgttctttagaatggcaaaacaccgtcgcccaggcgatcagtcagatcgacggcctgaaaacaacacagttaccatcaccagtaatggctgtactcacggcacttgaaatgaaatgcacaagatataaagtgcgtgaggatgttatggatcagatcgtccaggaaggcggtctggaatatgctactgatgtaataatacaccttcaacagattgatattgaatgggattatgcgaataatgtcattattattctgccgtctggcattgcacctagctacttggagcaatattccagatttgaatgacgcctacgtaaacatttatcactgacggaagagtctctctggcaaaaatgtgcacaaaaacttattgccgcaattccacatattccagaatggcggcaaccattaattgctttgttattacccgaaaaaccagaaattgcacatgaaattgcccagcgtctactggggcaaaaaaaattaccctcgcttgagtggttaaaaatagtggcgactgatgagcacattcttgcctcattagaaaaatatcacgaaccatatgccatttttgatgattactattgtggtgcgatatggtcagccaccgtattacaggagcaaggtgttgcagccctgccccgatttgctccctatgccgcaagtgactactgcgccgatgtgttgcgtcatatcaatcatccgttcgcattgacactgcttatacgtgtagccgggcaaactaaacgctgtcacgatcggatgacgaaagccattgctgcgttcccacatgcagcaatggcggcactgacggaacttcttgggcaaaaagaagagaacagttggcgcattatgctaatgacaatgcttatctcacaaccagcactggcagaacaggtcattccctggctctcgacacccgcagttgccgtactgaaatcatgccagcaacaactgacacagccctcaaaccatgccagcgccgatctactgccagccgtagtagtctcccctccctggctttcgaaaaagaaaaaatcgccgattccggtgctggatttagcgccattaggcattgagccaatctgttatctgacagaagaaatcagtaatcaacttttggcgaaatatatctggtattcaaaacacatcacggttagccatgaagaaagtactaccaacctgttggcaaggatgggttttcaacgacggatcgctggtacatatattaaagctcccgaagcggtagttgaggcatggctaaatgaagattattcaaccttactaagtgaatttaaggtgtttcattcacctaccgggcattattggcagttggggattttgacaacattgccgctggagaaagcagtaaaagcatggaatgcccttaccctatctccacataccgataccgaatactccatgttacattttggactcaaagggttacctgggttagtaaactcacttgcacgctatccacaagaagccttgcccatcacgaattacttcgcagcgagtgagctggctcctgccgtcgcccgtgccttcaacaaactgaaaacgctacgcgaaaacgcccgtagctggctgttgaaatacccggaacatgcccttaccggcctgctgcctgcggcgctcggcaaagccggtgaagcacaggataacgcccgcgctgccttgcgtatgcttaccgaaaacggtcatcagccattactgcaagaaatcgcccgacgttataaccagccggaagtaaccgatgcggtgaacgctctgcttgcgctcgatcccttagataatcacccgacaaaaatccccactcttccggccttttatcagccatcgctctggacgcgcccggtattaaaagcaaatgcccaatcactgccagatagcgccctcctccacctcggtgaaatgctccgcttccctcaggaagaggctctgtatccgggattattgcaggtgaaagacgtctgttccgccgactcactggcgggatttgcctgggatctgtttaccgcctggcagaccgctggcgcgccgtcgaaagagagttgggcgttcactgcgttaggcgttctcggtaacgatgacaccgcccgcaaactgacgccattaatacgcgcctggcctggtgaatcccagcataaacgcgccaccgttgggttggatattctcgctgctatcggtagtgatatcgcccttatgcagcttaacggcatcgcccagaaactgaaattcaaagcattacaggagcgggcaaaagaaaaaattgccgacattgccgagagccgcgaactcacggtggcggagcttgaagatcgggttagcaccggatctcggtctggatgataacggttcgctgctgctggattttggcccacggcagttcaccgtcagctttgatgaaaccttaaaaccgtttgtgcgtgatgtttccggcagccgcctgaaagacctgcccaaaccgaacaaaagcgatgatgaaacgcgggcgaacgatgcggttaaccgctacaaattgctgaaaaaagatgcgcgtaccatcgccgcccagcaggtagcaaggctggaatccgccatgtgcctgcgccgccgctggtcgctggaaaacttccagctcttcctggttgagcatccgctggttcgtcacttaacccgccgtctgatttggggcgtttatagcgccgaaaaccagctactggcttgctttcgcgtagcagaagataacagctccagcaccgctgacgatgatcttttcaccctgccggaaggcgatatctctatcggcactcctcacgttctggaaatatcaccaacggatgctgccgcctttggtcagctttttgccgactacgaactgctaccaccgttccgccagctcgaccgtaacagctacgccctgacagaagccgagcgcaatgccagtgaactgacccgctgggcaggcagaaaatgcccgagtggtcgggtcatggggctggcgaataaaggctggataaagggcgaaccacaggatggaggctggatcggatggatgatcaaacctttgggtcgctggtcgttaatcatggaaatcgatgaaggctttgcggtaggcatgtcgccagccgaactcagcgctgagcagctcttaagcaagctgtggctatgggaaggcaaagcagaaagatatggctgggggagtaattcaacacaggaagcgcagttctccgtaatcgatgccatcaccgccagcgagctaattaacgatattgaagccctgtttgaataaggaaagagcatggacaaggaattaccgtggctggcggataacgcccaactggaactgaaatataaaaaaggcaaaacgccgctcagtcatcgtcgctggccgggcgaaccagtgtccgttatcactggaagtctcatccagacattgggtgatgaattgctacaaaaagctgagaagaaaaaaaacattgtctggcgttatgagaattttagtctggagtggcagtccgccatcacgcaggccatcaacttgatcggcgaacacaaacccagtatcccggcccggacaatggcggcgctagcctgtatcgcgcaaaatgacagccaacagttgctcgacgaaatcgtccaacaagaggggctggaatatgcgactgaggtggtgattgcacgccagtttattgcgcggtgttatgagagtgatcctctggtagtgacattgcagtatcaggacgaggattatggctatggttatcgcagtgaaacctataacgaattcgatctccgactgcgtaagcatctctctctggcagaggaaagctgctggcagcgttgcgccgacaaactcattgccgcactaccaggaataaacaaagttcgccgcccttttattgcgctgatcctcccggaaaaaccagaaatagccaatgagttggtaggccttgaatgcccgcgaactcattttcattctaaggagtggttaaaagttgttgctaatgaccccacagcggtgagaaaactcgaacactactggagccaggatatatttagcgatcgagaagccagctacatgagccatgaaaaccacttcggctacgcggcctgcgccgcccttttgcgcgaacaaggactggcagccattccgcgcctcgcgatgtatgcccataaagaagattgcggcagtctgctggtacaaattaaccatccgcaagtcatccgcaccttgctactggtggctgataaaaacaaacccagcctgcaacgtgtagctaaataccataaaaacttcccccatgcgacgctcgccgcactggcagaactgctggcgttaacagaaccaccagcccgccctggttatccaatcatcgaagacaaaaagctgcctgcacagcaaaaagcacgcgatgaatactggcgtacgctgttacaaacgctgatggcaagccagccacaactggcagcagaagtgatgccgtggttaagtactcaaccccagagtgtgctgaagagttatttaagcgcaccgcccaaaccggttattgatggcaccgataacagcaatctgccagaaatcctcgttagtccaccgtggcgtagtaagaaaaaaatgacagctccacgtcttgatttggcaccgctcgaattaactccgcaagtttactggcaaccaggcgaacaagagaggcttgccgccactgagcctgcccgttatttcagcacggaatctcttgcgcaacgcatggaacaaaaaagtggacgagttgtattacaggaactgggttttggggatgatgtatggctgtttctgaattatatactccccggaaaactggatgctgcacgcaatagtctctttgttcagtggcattactaccaggggcgggttgaagagatcctgaatggctggaactccccggaagcacaattagcagaacaggcgctccgcagcggtcacatagaagcgttaattaacatatgggaaaatgacaactacagtcattatcgtccggaaaagagtgtctggaacctgtatttattggcacagttgccgcgtgagatggctttgaccttctggctgcgtatcaatgagaaaaagcatctgttcgcgggtgaggactattttctcagtatcctcggattggatgcgctaccaggtctgctgttggcttttagtcatcgtccaaaagaaacatttccgttaattttaaattttggcgcaacagaactggcgctgcctgttgcccacgtctggcgacgtttcgcggcgcagcgtgatctggctcgccagtggattttacaatggccggaacatacggctagtgcacttatccctcttgtctttaccaaacccagcgataatagcgaagccgcattacttgccctgcgtttactgtacgaacagggacatggcgaattgctacaaaccgtggcaaaccgctggcagcgtacagatgtatggtctgccctggagcagttgcttaaacagggtccaatggacatttacccggcacgcattccaaaagcccctgatttctggcatccgcaaatgtggtccaggccgcgccttatcactaataatcaaactgttaccaatgacgctctggaaattatcggcgaaatgctgcgctttacccaggggggacgtttttatagcgggctggaacaactgaaaacgttctgccagccacaaacgctggcagcttttgcctgggatctcttcactgcgtggcaacaagctggtgcccccgcaaaagacaactgggcatttctggcgttaagtctctttggtgacgaaagcacggcacgggatctgacgacacagatcctcgcctggccacaagaaggcaaatctgcccgtgctgtcagcggcctgaacatccttaccctgatgaataatgatatggcgctgatacagctgcatcatataagccaacgggctaaatcccgccccttacgtgataacgcggcggaatttcttcaggtggtcgcagaaaatcgcgggctaagccaggaagagctagcggacagattagtcccaaccctgggccttgatgatccgcaggcgttgagttttgattttggtccccggcagtttaccgttcgcttcgatgaaaatctcaacccggttatctttgatcagcaaaacgttcgccagaaaagcgttccccgtttgcgcgccgatgacgatcaactgaaagcgcccgaggcactggcccgactaaaagggctaaaaaaagatgctactcaggtgagcaaaaacctgctcccgcgtcttgaaacggccctacgtaccacccgacgctggagcctggcagattttcattctctgtttgttaatcatccctttacccgtctggttacccagcgattaatatggggggtttatccggcaaatgaaccgcgttgtttactcaaagcctttcgtgtggccgcagagggggagttctgcaatgcgcaagatgagccaattgacctgcctgcggacgctctgattggcattgcccacccgttagaaatgacagcagaaatgcgcagtgaatttgcacagctttttgccgattacgaaattatgccgccttttcgccagttgagccgccgcacggtgctgctcacacctgacgagagtaccagtaacagcctgactcgctgggaaggtaaatccgctaccgttgggcaacttatgggaatgcgatacaaaggctgggagagtggctatgaggacgcatttgtctataacctgggtgagtaccggctggtccttaagtttagtcccggttttaaccactacaatgttgatagcaaagcgctaatgagcttccgttctcttcgagtgtaccgtgacaataaatccgtcacttttgccgaacttgatgtgtttgatttgagtgaggcgttaagcgcacctgacgtcattttccattaaaacacagcgggcagtgatgcaactgcccgttatcaacacgacttaccagcggggaaagcgatgatcgtgcaaaaagagctggttgctatttacgattatgaggtccctgtacctgaagatccgttttccttcagacttgagatccataaatgctctgaattatttacaggttccgtctatcgactggagcgattccggctacgtccaacatttcatcaacgtgatcgagaagatgctgacccgctaataaatgatgcgttgatttatataagagatgagtgtattgatgagcggaaattacgaggtgaaagtcctgaaactgtaatagcaatttttaatcgtgaactacagaatatattcaaccaagaaatagaataatatactctaaataattcaaattggtccgatccggcgcaacgtcccaatggcctggattataaatctcattatcttaattgcaacggggtccagccgtggttataattcgttcgttggaacacgatgttgcacaggctgtggtgttaggcctgaaaatagtaaataaaagaacctgcctcaccagcaggtttttttatttactgtgatctgctttccagatatttttcgctcaaacaactaatgcgccaaacatttattgcgcgtaaaatatcgtttatttcattaatacatttcagggatgaatatatgagtccgcagaataatcatctgcagcgtccgcctgctgctgtgttatacgccgatgaactggcaaaattaaaacaaaatgataacgcaccttgcccgcccggttggcagttaagtttgcctgcggcccgtgcttttatccttggcgacgaagcgcaaaatatcagccgtaaagtggtgattagcccctccgctgtcgaacgtatgttagtcactcttgctaccggccgcggtttgatgttggtgggggaaccgggtaccgcaaaatctcttctttctgaattactggcaaccgctattagcggcgatgccgggttaaccatccagggcggggcatctaccaccgaagatcaaatcaagtatggctggaactacgccctgcttatcaatcatggtccgagtacggaagcgctggtccctgccccgctttatcagggaatgcgcgacggcaaaatcgtccgtttcgaagagataacgcgtacaccgctggaagtgcaggactgtctgttaggtatgctttctgacagggtgatgacggggccggaactcactggtgaagccagtcagctctatgcgcgagaaggctttaatattattgccactgccaatacccgcgatcgcggcgtcaatgaaatgagtgctgcgctaaagcgtcgcttcgattttgaaacggtttttccgattatggatttcgcccaggagttggaactggtcgccagtgctagcgcgcgtttgctggcccatagcggtattccgcataaagtgcctgacgcggtactggaattactggtccgcaccttccgcgatctgcgtgccaacggcgaaaagaaaacgagtatggatacactgacagcgattatgtccaccgctgaagccgtgaacgtggcccatgctgtgggcgtccgcgcctggtttttagcgaatcgcgcgggggagcctgccgacctggtggaatgtattgccggaaccatcgtcaaagataacgaagaagatcgcgcgcgtctgcgccgttacttcgaacagcgtgtcgccacacataaagaagctcactggcaggcttattatcaagcccgccaccgcctgccgtgaggaaagatgcatgagcgagccgttaattgtcggcatccggcatcatagtccggcctgcgcccggctggtgaaaagcttaatcgaaagccagcggccacgatacgtgttgattgaaggcccggctgattttaatgaccgggtagacgaactgtttttagcccaccagcttccggtagctatttacagttattgccagtatcaggacggtgcagcccccgggcgtggtgcctggacgccatttgctgaatttagcccggagtggcaggcgctacaagccgcacgtcgcattcaggcacaaacttacttcatcgatttgccttgctgggcgcagagtgaagaagaggacgatagccctgatacgcaagatgaaagccaggccttactgctgcgtgccacccgcatggataacagcgataccctgtgggatcacttgttcgaagatgaaagccagcaaactgcattaccctctgcgctggcgcactattttgcccaactgcggggcgacgcctccggcgatgcgctcaatcgtcagcgcgaagcctttatggcccgctggattggatgggcgatgcagcaaaataatggcgacgtgttagttgtctgcggtggctggcacgctccggcactggcaaagatgtggcgcgaatgccctcagaaaattaacaagccagaattgcccagcctggcagatgccgttacaggttgttatctcacaccctacagtgaaaagcgccttgatgtgctggcaggataccttagtggaatgcctgccccggtatggcaaaactggtgctggcagtggggcttgcagaaggccggtgaacaactgctaaaaactatccttacccgtttgcgccagcacaaattgcccgcttctaccgcggatatggctgccgctcatctgcatgcgatggcgctggcacagttgcgcggtcatacactaccgttacgcactgactggctggatgccatagcaggcagcctgattaaagaagccctgaacgcgccgttgccgtggagctatcgcggcgttattcatcccgataccgatccgattctgctaacgttgatagacacattagcgggtgacggattcggtaaacttgccccttctacgccacaaccgcctctgccaaaagatgtcacctgcgaactggaacgtaccgcaatctcccttccggcggagcttaccttaaatcgctttacccccgatgggctggcgcaaagtcaggtgttacatcggctggcaatactggagatccctgggattgtacgccagcagggaagtacactgacacttgcaggcaacggtgaagaacgctggaaattaacccgcccgcttagccagcatgcggcattgattgaggccgcctgttttggtgccacactccaggaagccgcacgcaataaattagaagccgatatgctggacgcgggcggaatcggcagtatcaccacatgtcttagccaggcggcgttagcgggtctggcgtccttcagtcaacaattactggagcaactcacactattaatcgcccaggaaaatcaatttgccgaaatgggccaggcgctggaagtgctttatgccttatggcggctggatgaaattagcggtatgcaaggcgcgcagatattacaaacgacgttatgcgcgactatcgatcgcacgctgtggctgtgtgaatctaacggcagaccggatgaaaaggagtttcacgctcacctgcatagctggcaagcgctttgccatattctgcgcgatctacatagcggcgttaatttacccggcgtttctctttctgcggcggtagccttactggagcgacgcagtcaggcaattcatgccccggcgctggatcgcggcgcggctcttggcgcactaatgcgtctggaacatcccaacgccagtgccgaagcggcgctgacgatgctggcgcagttatccccggcacaatctggtgaggcgctgcacggtttgctggcgctggcccgccatcaactggcctgtcagccggcatttatcgccggtttcagcagtcatttaaatcaactgagtgaagccgattttattaacgccctgcccgatttacgcgcggcgatggcctggctaccaccacgagaacgcgggacgctggcgcatcaggtgcttgagcattatcaactggcgcaacttcccgttagcgcgctgcaaatgccgttgcattgtccaccacaggccattgcacatcatcaacaactcgaacagcaggcactggcaagcctgcaaaactggggagttttccatgtctgaactgaacgatcttctgaccacccgtgagctacaacgctggcgattaattcttggcgaagcggcagaaacgacgctttgtgggctggatgacaacgcccggcagatagaccacgcgctggagtggctgtatgggcgcgatcctgaacggctccagcgtggtgaacgttccggtggattaggtggcagtaatctcaccacccctgagtggatcaacagtattcacacgctgtttccgcagcaggtgattgagcggctggaaagcgatgccgtgctgcgctacggcattgaagatgtggtgacgaatctcgacgtgctggaacgtatgcagccttctgaaagcctgctacgcgctgttttgcacaccaaacatctgatgaaccccgaagtactggctgccgcccgccggatagtgtgccaggttgttgaagaaattatggctcgactggcaaaggaagttcgtcaggctttttctggtgtccgcgatcgccgtcgccgtagttttattccactggcgcgaaactttgatttcaaaagtactctgcgcgccaacctgcaacactggcacccgcaacacggcaagttgtatatcgaatccccccgctttaacagccgcattaaacgccaaagcgaacaatggcaactggtcttactggttgatcaaagcggaagcatggtcgatagcgtgatccactctgcggtgatggcggcctgtttgtggcagttacccggcattcgtacccatctggtggcgtttgacacaagcgtcgttgatctcacggcagacgttgccgatccggtagagttattaatgaaagtacagttgggcggcgggaccaatatcgccagtgccgtggagtatggtcggcaacttattgaacaaccagcgaaaagcgtcattatcctcgtgagcgatttttacgaagggggtagtagtagtttactgacgcatcaggtgaaaaagtgtgtccagagcggcatcaaagtgctgggactggcagcgctcgatagcaccgcaacaccttgctatgaccgcgatacggcccaggcgctggttaatgtcggcgcacaaatagccgccatgacgccgggcgagctggcaagttggcttgcggagaatcttcagagttgacataacttgcggagaatcttcagtcatgaatagtctacgtccggaattattagaactgacaccgcaggccctgacggcgttaagcaatgccggttttgttaagcgcagtcttaaggaactggaaaatggcaacgtcccggagatcagccatgagaacgacgctttaatcgccaccttcagtgacggtgtccgtacccagctggcgaacggccaggcactgaaagaggctcagtgcagttgcggggccaacggtatgtgccgtcatcgcgtgatgctggtgttaagttatcaacgactttgtgccaccactcagtctacggaaaaagaagaagagtgggatccggcaatctggctggaagaactggctacccttcccgatgctacccgcaaacgcgcacaggcgctggtcgctaaaggcatcaccattgagttgttctgtgcgccgggtgaaattccctctgcccgcttaccgatgagcgatgtgcgtttttattcccgcagcagtattcgtttcgcccgttgtgattgtattgaaggcacactttgcgaacatgtcgtactggcggtacaggccttcgtcgaggccaaagcgcagcaagcagaatttaaccatttaatctggcagatgcgcagcgaacacgtcacaagttctgacgatccgtttgccagcgaagaaggcaacgcgtgtcgtcaatatgttcagcaattaagccagacattatggcttggcggcatcagccagccgctcatccattacgaggcagcattcaaccgcgcattgcaggcggcagagacctgcaactggcgctgggtgagtgaaagcctacggcaactgcgcgccagcgttgatgccttccacgcccgcgccagccactataatgccggagaatgcttacatcagcttgcggcattaaacagtcgattaaattgcgcacaagagatggcccggcgcgacagtattggtgaagttcctcctgtgccgtggcgcacggtcgttggctctggcattgccggagaagcaaagcttgatcatctgcggctggtgtctttaggtatgcgttgctggcaggatattgagcattatggtttacgcatctggtttaccgatcccgacaccggcagtattttgcaccttagccgcagttggccgcgaagtgaacaggaaaacagtccggcagctacgcgtcggctgtttagttttcaggctggcgcactggcgggcgggcaaattgttagtcaagcagcaaaacgcagtgccgatggcgagctgctgttagctacccgcaaccgcttaagcagcgttgtgccgctgagccctgatgcctggcaaatgttgagcgcgccgttacgccagccgggcattgtggctttgcgggaatatttacgccagcgtccccccgcctgcatacggcctcttaatcaggtcgataacttatttattctgccggtcgctgagtgtattagcctcggttgggacagcagccgccagacgctggatgcgcaggtcattagcggcgaaggggaagataatgtgctgacgttaagtttaccagccagtgccagcgcaccttatgccgttgaacgcatggcggcgcttttgcaacaaacagacgaccccgtgtgtctggtttctggctttgtcagttttgttgaagggcaattgacactggaaccacgggtgatgatgacaaaaacccgtgcctgggcgctggacgcagaaactacgcctgtggcaccgctaccttctgccagcgttttgcctgtgccgtctactgctcatcagttgctgatacgctgccaggcgttacttattcaactgctccataacggctggcgctatcaggaacagagtgctattggtcaggcataattgctggcgaatgacctcaccgcggtgggtttttatcggctggcacatgtgttgggacaatttcgtaatacagaaagcgaggcacgggtagaagcaatgaataacggtgttttgctttgcgaacaattattccccatgcttcagcaacaaggatgaaatagtgctttttactaagagttctactccagttccggactgctcacgccacggtattaggcatatcctatatagcccctggtgagagtcaccagttccttgattaaataaaatggagttttacatgaaggctttcaataagctgttttccctcgttgttgcatctgttctggttttctctcttgctggctgcggtgacaaagaagaaagcaagaaattcagcgccaatctgaacggcactgaaattgccattacctatgtctacaaaggtgacaaggtgcttaagcaatcttctgaaaccaaaattcaatttgcctccattggtgcaaccaccaaagaagatgctgccaagacacttgagccgttaagcgccaaatacaaaaacatcgcgggtgttgaagaaaaattaacctataccgatacctacgcgcaggaaaacgtgactatcgatatggaaaaagtggattttaaagccctgcagggtattagtggaatcaacgtttctgctgaagatgccaaaaaaggtatcactatggcgcaaatggaactggtgatgaaagccgctggttttaaagaagtgaaataatcggttggcggtcatgctctaaacatgaccgccaattttttagccttttttcacatgctggcgcgctgccagtccacgcagaaaataacgtaaaaattgatcgccgcattcgcggaagtttttatgatccggtgcgcgcatcatcgctgtaatttccggcatgctaacgcggaactgctgttcggtgaggatagccagaatgtcatcggttttcaggctaaacgcgatgcgtaattttttcagcacgatgttgttattaatgcgacgttccggctccagtgccggagcagactcatccttgccgcgtttttcataaatcaggccattgaggaaactgctcaaaacaatgtccggacaacgctgaaaaccctcttcgtcttctttacgtagccagacggcgatctgttccgcggtggcttcgacattacccagcgccagaatacgcaccaggtcattattattggctttcaaaatgtagcgcacgctgcgcagaatatcgttacttagcatgaggccttcaggtgttgatgaggcaaaaagccattttagcagtcttttacaggccaatcgcctcttttaagcttttcagataacggcggctgaccggcacggttaagccattacgcaaaatcaactcggcctggccgttatcttccagacgaatctcctgtaaatgcgcgaggttaaccagatactgacgatggcagcgcagtagtggtgtacgactttccagggtacgtaatgtcaattcggtaaagccctctttcccttcgtggctggtaacgtagacaccgctcatccgactgctgacaaatgccacatctttcatttgcagcaaataaatccgactatgccccgtacaagggataaatttcagcgcctgttgattttccggtaacaggctaacatcctgcttgctgcgctcctgacgcaatcgcgccagcgttttctccagtcgcgcttcatcaattggcttcagcagataatcaaaggcatgttcttcaaaggctttaattgcgtattcgtcaaacgcagtgagaaaaacaatatacgggcgatgttccgggtcaagcatccccaccatttccagaccactgatgcgcggcatctggatatcgagaaacagcacatccgggcgcagtttatgcaccgcgccgatcccttccacggcgttactacactctccaacgatttcaatatcgctctgctcctgcaaaaatacacgcaggttctcccgtgctaacggttcatcatcgacaattaagactttaatcatgcctcgtccctccatggtagtcgtaacgttattcgggtgtaactatcaggctcacaggcgacgcttattccatagtcatcgccaaaccgttcacgtaaacgcttatccaccagattcatccccagcccactggcattggttaccggttgatacaaaccggcattgtcttcgatctccagcatcaaatgttgcccctcacgtcgggcgctgattgccactcgccctgtatccagcagttgacttgtcccatgtttaatggcgttttccactatcggttgcagggtaaacgcgggcaattgctgctgggataattcttgcggaatagcaatgttgacctgcaaccggctctggaagcgcgccttttcaatttgcagataagcattcacatgttcaatttcgtcggcgagagtaacaaactcgctaggccgctttaagtttttgcggaaaaaagtggaaagatactgcaccagctggctggcctgttcgctgtcgcggcggatcaccgctttaatggtgttaagcgcattaaacaaaaaatggggattcacctgggcgtgaagcagtttgatctcactctgggtgagcatcgctttttgccgctcatattgcccggcaaggatctgcgcgctaagcaattgcgcaatcccctcacccaacgtgcggttgatgctactgaataaacggtttttggcttcatacaatttgatggtgcccatcacccgctgattttcaccacgcaacggaattaccagcgtgctccccagtttgcattgcggatgcaaagagcaacggtaaggtacttcgttgccatcagcgtagaccacttcaccggtttcaatcgcttttaaagtataagtactagaaatcggtttgccgggtaaatggtggtcgtcaccaattccggtaaaggccagcaatttctctcgatcggtaatcgcgactgcaccaatatccagttcctgatacagcacctgagccactttcatgctgttcacttcgttaaacccctggcgcaaaatgccttccgtgctggctgccactttcagcgcagtggcagaaaaagcgctagtgtatttttcaaacatcgcgcgtttatcgagcaatatacgcataaacagcgccgcgccgacggtattggtgaccatcattggcgcagcaatattactcaccagacgcaccgcatcttcataaggtcgggcgatcgcaaggatgatcagcatttgcaccatttcagcgacgaacgtgacggcaccggcggtaatggggttaaagactttatcagtgcgcccgcggcggatcaggatgctgtgtaccaggccaccgagtaatccttcaacgatggtgctgatcatgcaacttaacgcggtcatgccccccatgctatatcgatgtaagccgccggtcagcccaaccagcccaccgacgaccggaccgccgagtaagccgcccattaccgcgcctatcgcacgggtattggcaatagaatcgtcaatgtgcaacccaaaccaggtgcccatgatgcagaagatggaaaagacgatgtagcagagaaatttatgcggcagacgaaccgtgacctgcattaacggtatgaataatggcgttttactcattaaccatgcaatgactaaaaaaacgcacatctgctgaagcagcagcaacaccagattaaaatcgtacatacccgcaaaccacacttccctttaaaacgcgtaacatacattgcctgcgtttaactttctttgaactcttgcagaaaaatgagaattcgtgagtacgatcactcaaaatcgcctggcaaaaataaaatcaccctatagatgcacaaaaaacgggcaaaactacctggttcgcaaaactgcgtctaaagttaaaccgggacctcgcgagcaagggtgagacgatggcgctttacacaattggtgaagtggcgttgctttgtgatattaatcctgtcacgttacgcgcgtggcagaggcgttacggattgctgaaaccgcaacggacagacggcggtcatcggctgttcaacgatgccgatattgaccggatccgcgagatcaaacgctggatcgacaacggcgtgcaggtcagcaaagttaaaatgctgctcagtaatgaaaatgttgatgtgcagaacggctggcgcgatcagcaagaaacattactgacttacctgcaaagcggcaatctacatagcctgcgaacgtggatcaaagagcgcggtcaggattaccccgcccagacactcaccacacatctgtttattcctctgcgccgacggcttcagtgccaacaaccgactctccaggcgctgctggcgatcctcgacggcgtactgatcaactacatcgccatttgtctggctagcgcacgtaaaaaacagggtaaagatgcgctggtggttggctggaatattcaggataccacccgtctgtggctggagggctggattgccagtcaacaaggatggcgcattgatgtcctcgcccacagcctcaatcaactacgccctgaactattcgaaggccgtacattgctggtgtggtgcggtgaaaatcgaacctccgcccaacagcagcaactcaccagttggcaagaacaaggccatgatattttcccactcggcatttaatgattcgttaacaaatgcgctttactgtacaatcctttcgttaacataaggagtgcattatgcgcatagctaaaattggggtcatcgccctgttcctgtttatggcgttaggcggaattggtggcgtcatgctcgcaggttatacctttattttgcgtgctggctaagcgcctgcaccagcctttcaaacaggcggtctgcgatgatcgccgccagtgccaccagtaacgccccctggatcacatacgcggtattaaatccgctaagcccgatgatgatgggcgtacccagcgtgctggcccctaccgtactggcgatcgtcgccgtaccaatgttgataatcacgctagttcgcacgcccgccagaatcaccggagccgccagcggtagctcgaccttacgcactcgctgaccacgactcattcccatacctttcgcaacttctgtcacgctggcatcaatcgctcccagcccggcaagtgtcgcctgcaggacgggcagcacaccgtaaaggatcaaggcgataatcgctggttgcagaccaaagccgatcaccggaacggcgatcgccagcactgcgacgggcggaaaagtctgtccaacggcggcaatagtttccaccagtgggcgaaattccgcgccccacgggcgagtgacagcaattccggcaccagtgccaatgatcaccgcaaacaaactgctaattcccaccagccagaaatgagccagtgccagagctgcaaaactttcttgctgataaacgggtcgtggcagttgtgggaacaaggcagcaaacagcggctggctgtaaggcagccagaaaatcagcgccacaaacagagcaatgagccagaacagcggatcgcgcaacatcttcatacgcttacgcctccaccagcagatcctgaaaatgcagcgtgccgcaaggctggccctgcatgttcaccaccggcagcacctcgcatccccgcgcaacaaacagagagagcgcatcgcgtagcgtcatctcttctgccagtgcctcaccatctgctcgttcttcgcgacgcacgtaatccgccacactacgtaagctaagcaggcgcacacccagttcactacgtccaaaaaactggcggacaaaatcattcgccggacgagtcagcatcgtcagcggattgccctgctgcactacttcaccgtgatccatcaataccagatgttctgccagccgtagcgcctcatcaatatcatgagtgaccagcacaatggtacgccccagcaaacggtgaatgcgcgtcatctcttgttgcaacgcgccgcgcgttaccgggtccagtgcgccaaaaggttcatccattagtaagacttgcggatcggcagccagtgcacgcgccactcccacacgttgctgctgaccaccggaaagctgatgcggataacgctcacgcaaattactctccagccccagtagcgccattaattcgtcgatacgatcgtcaatccgcgcccggctccatttttgtaattgcggcacggtagcgatgttttgcgccacgctccagtgggggaacaggccaatagattgaatggcatagcccatccggcggcgcaactccagtactggcaggctgcgaatttcttctccggcaaagcggatctctccgctgtcatgctccaccaggcggttaatcattttcagggtggtggatttgccggagccagatgtgccaatcagcacgctaaaactcccttcctgaaaattgagattgagatcgttaacggctttttgtgcgccgaacagtttgctgacatggctaaattcaatcattacgtttcaccttcagcagtgcgataagcaaatcgaacagcgcgtcggtaagcaccgccagaacaattaccgggatcacccccagcaacactaaatcaatggcgctgcttagcagcccctggaaaaccagcgcaccaaaaccgcctgcgccgattaacgccgcaatcaccgccatacctacagtttgcaccatcaccacccgcaggctgcgcagaaataccggtaacgccagcggtaactgaacatgcaggaaacgctgcgccccgctcatccccatcgctctggcgctttccagcacatcgcgcgggatctggttcaaaccgactaccacgccgcgcaccagcggcagcaaggcatagagcaccagcgcaatcagtgcgggtgtcattccggttcctgctatgccgagcgtccccagccacggaaaggccgtaaccagcgcggcaagcggcgcaatcaacaggccaaagagcgccacgctaggcacggtctgaatcacattgagcagagaaaaaattgccccctgccgagcagtggaaaagtagcaccagatgcccaacggcacaccaatcactaacgcaggcagcaccgcaccaaacagcaacgtcagatgttgtgccagcgcgtcgtcaaacacatcctgacggttggcgtattctttcattagactgagatcgttaagcgtgccggagtacagcaaccacagcggaataatggcaatctgcatatgcaacaaccagcgccacagcggatgcgtggagattcggcggatggcatcgctacaggccagcaatgccagcgccgcagccagccagaaaccactgccgaggctggtacgcgccagcgcactgccattttgcgccagttgggtcgccgcctttccagctccccacaccagcaatacgaagacgaattgcgccagaatgagtgcacaaatgctgccttttttaccgggaataaaacaggccgtcagccaggcgcaaccaacgcccaccagcatccagatcgtttgcggccacagctgccagagatgacgcccctcaccgctaactaaacgattaggcgcgtaactgataaacggcagcgccgctgcgattgccgtcagcaacagcagcagcgccagaacaggattaatacggaaataagtcacgggaaattacttcgtccaccctttttgtttcaggtagtcggcagccacttttttggcatccagtccttccacagcaatgctggcattcagttgctgcaatgtttttgcatcgaggctggcgaagactggctgtagccactgtgccatttgcggatactccctcaacacgctctcacgcaccactggtgcaggcgcgtagataggttgcacaccttgcggatcgcttaaggtttgcagccccagcgccgctaccgggccgtcagtgccgtaagccattgcagcattaacgccagaggtttgctgggcagcggctttgatcgtcaccgccgtgtcgccaccagccagactcagcaactgatcctgaccgagcttaaagccataggctttttcaaacgcgggtaacgcatcggcgcgttcgataaactctgcgctggctgccagtttgaaggtgccgccctcttgcagataacgactcaggtcggcaaggctagtgagtttatttttctctgccacatcctgacgcacggcgatagtccaggtgttatttgcaggcgcgggcgtcagccagattaacttgttgtgctcgctatcgagctttttgactttctcgtaaccttgctgcgcgtttttccacgctgcatcgttttcatctttaaagaagaaagcgccattgccggtatattccggatagatatccagttcaccggaagtaatcgccccgcgcaccacaggagtcgttccgagttgcactttattcaccgtcggtacgccgtggctttccagcacctgcaaaatgatattgccgagtagcgcaccttcggtatcgattttactaccgactttaacgggggaagccgcctgtagcggcaggctcacggctgccaacataaccagactacctgcccagagctttaagagtggcatgatgctttcctcattcttttactgttgttttcagcgaattaagagaaaagcatagttgataatggcggggttagcttgagcggaaggattcagttgcagaatcagataaatacttaagaggcatattcggtccggcgtttcctgccggatgcggcgcgagcgccttatccggcctacaaagggcgcaaacgtcgcgcccttactaaagcattacagcaactcaaactcgcctttcttaacgcgtgcggaatcagtgccgataaagacattgaacttgccaggctcggcgtcatatttcatctgttgattccagaacttcagcgcctcaatatcgatcgggaagctgacagtctgagtttcgcccggtttcagggtgattttctcaaagcctttcagctgtttcacagggcgactcatggaagccgtcacatcctgcaagtacatctgcactaccgtggcaccctcgcgcttaccggtgttcgtcacctgcacgctggcagtcactttgccgtcacgcttcatggtcggcgcagaaagtttcacatcagagacggtgaaagtggtgtagctcagcccatagccgaacggatacaacgccccgttagcttcatcaaaataacggctagtgtatttgttcggcttgtcggcattatacgggcgaccggtattcagatggctgtagtacaccgggatctgcccgacagaacgcgggaaggacattggcagcttgccggacgggttgtaatcgccaaacaatacatcggcaattgcattaccgccttcagtccccgcaaaccaggtttccagaatcgcatcagcctgctgatcttctttcaccagcgccagcggacgcccgttcatcagcaccagcaccagcggtttaccggtggctttcagcgccgcaatcaagtcacgttggctttgcggaatagtgatatcggtccggctggaggcttcgtgcgccatcccctgtgcttcaccgactacagccaccaccacatcagattgtttcgccgtctgcaccgcttcatcaatcatctcttgcgggctacgcggatcgactttgaccgcttcttcatactgattcaggaaatcgataatgcctttgtcactggtaacgttcgcccctttggcatacagcactttaccgttttcaccgacggcatttttaatcccggtcagtacggtcacggattgatcggcaacaccggctgcggaccagctgcccatcacgtcacgtttactgtccgccagtggcccaaccaccgcaatggtggcgctttttttcagcggtaacgtttcgagacggtttttcagcaacaccaagctttcgcgcgccacttcacgcgcttctttacggtgcaggcggctttcggcattggtatccaccgggtcagactctttcggccccaaatggctgtatgggtcgttaaacaaccccatatcatatttaacgttcagtacatggcgggcagcatcgtccagctctgccatcgtcactttgccggatttaatcaacccaggcagatacttgctgtagtactcgtcgctcatgctcatgttgattccggatttcagcgccacgcgcaccgcatcttccgggtctgccgccgtgccatgtttaatcagctctttgattgcaccgtgatcggaaacggtgatgcctttaaagccccactggtcgcgcagaacatctttcagcagccaggaatcggaggtggctggcgtgccgttcaggctgttcagcgccaccatcaccgcgccgctgcctgcgtccagccccgctttgtacggcggcatataatcattaaacaggcgctgcggactcatatcgacggtgttgtactctttaccgccttctaccgcgccgtatgcggcaaagtgtttgacgctggtcatcacgctgtagcgatctgccgggcttttaccctgcatcgcttccaccatggttttacccattgtactggtgagatacgtatcttcgccaaaaccttcggaagcacgtccccagcgcggatcgcggctgacatcgaccatcggtgcccaggtcatattcaggccatcatctgccgcttcataagcagagacacgtccgaccgttttcactgcatcgaggttaaaagagctggccagaccgaggctaatcgggaacaccgtgcgctgaccgtgcagcacgtcgtaagcaaagaaaagaggaattttcaggcggcttaattccatcacctgatcctgcatggcgcggatatcctgacgggttacggtgttgaaaatcgccccaacctgaccgtctttgatcatctcgcggatcgcctctttcgggttatccgggccgacgctgattaagcgcagctgaccaattttctcatcaactgtcattttcttaagcagttcggtgacgaacgcatcccgcgcttcgggcgttaatggatggttgccgaataaatcatccgccagtgctggctgcagggccagactcaccgcgattcctacactacatagccatttcatatggatttttcttcctttgttgcccgacgtggcagcgaaaatggtgcaaaaaccgtagtttgccataagcatgatggagagagaaaaagaatgctcagtttattgtctgaattttcaaaatattcactcgctgaattgttatacaaggcgctattctagtttgtgatattttttcgccaccacaaggagtggaaaatgtcttccatgacaacaactgataataaagcctttttgaatgaacttgctcgtctggtgggttctagtcacctgctcaccgatcccgcaaaaacggcccgctatcgcaagggcttccgttctggtcagggcgacgcgctggctgtcgttttccctggcagtctactagaattgtggcgggtgctgaaagcctgcgtcaccgccgacaaaattattctgatgcaggccgccaatacaggcctgaccgaaggaagcacgccaaacggtaacgattatgatcgcgatgtcgttatcatcagcaccctgcgtctcgacaagctgcacgttcttggcaagggcgaacaggtgctggcctatccgggcaccacgctctatagcctggaaaaagccctcaaaccgctgggacgcgaaccgcacagtgtgattggaagtagctgtataggcgcaagcgtcatcggcggtatttgtaacaactccggcggcagcctggtgcaacgtggcccggcgtataccgaaatgagcttattcgcgcgtataaatgaagacggcaaactgacgctggtgaaccatctggggattgatctgggcgaaacgccggagcagatccttagcaagctggatgatgatcgcatcaaagatgacgatgtgcgtcacgatggtcgtcacgcccacgattatgactatgtccaccgcgttcgtgatattgaagccgacacgcccgcacgttataacgccgatcctgatcggttatttgaatcttctggttgcgccgggaagctggcggtctttgcagtacgtcttgataccttcgaagcggaaaaaaatcagcaggtgttttatatcggcaccaaccagccggaagtgctgaccgaaatccgccgtcatattctggctaacttcgaaaatctgccggttgccggggaatatatgcaccgggatatctacgatattgcggaaaaatacggcaaagacaccttcctgatgattgataagttaggcaccgacaagatgccgttcttctttaatctcaagggacgcaccgatgcgatgctggagaaagtgaaattcttccgtccgcattttactgaccgtgcgatgcaaaaattcggtcacctgttccccagccatttaccgccgcgcatgaaaaactggcgcgataaatacgagcatcatctgctgttaaaaatggcgggcgatggcgtgggcgaagccaaaagctggctggtggattatttcaaacaggccgaaggcgatttctttgtctgtacgccggaggaaggcagcaaagcgtttttacaccgtttcgccgctgcgggcgcagcaattcgttatcaggcggtgcattccgatgaagtcgaagacattctggcgttggatatcgctctgcggcgtaacgacaccgagtggtatgagcatttaccgccggagatcgacagccagctggtgcacaagctctattacggccattttatgtgctatgtcttccatcaggattacatagtgaaaaaaggcgtggatgtgcatgcgttaaaagaacagatgctggaactgctacagcagcgcggcgcgcagtaccctgccgagcataacgtcggtcatttgtataaagcaccggagacgttgcagaagttctatcgcgagaacgatccgaccaacagcatgaatccggggatcggtaaaaccagtaaacggaaaaactggcaggaagtggagtaaaaattacggatggcagagtatcgccatccgaattcacttaatcgttctgtgccgtctgccccgccgccgccatttgggcggctttttgttttttatagctcaacgctgctgccggcacaggcatcactttaccggtttcaatccaggtacgcaggcggctggcatcggcaaaatgggtatatttgccaaacgcgtccatcactaccagcgccaccggtttattattgataaccgtacgcatcaccagacaatggcccgccgcattggtaaagccggttttggttaactgaatattccagttatcgcgatacaccagatgattagtattgcggaacggcagcgtatacgtcggattagagaaggttgccatatcttcccgggtagtacttaactgcccgatcaacggatattgtttgctggcaatgagcagtttggttaagtcacgggcagtactaacgttatgcacgctcaatccggtaggttcaacaaagcgcgtgttgttcattccgaggcttttcgctttcgcattcattgccttaataaaggctttgtaaccaccgggataatggtgcgcaaggcttgccgccgcgcggttttcactagacatcagcgccagcaacagcatatctttacggctgatttcgctattcagtcgtacgcggctatagacccctttcatctccggcgtctggctgatatccacttttagtttttcatccagcggcagtcgtgcatccagcacaaccatcgcggtcattaatttgctgatagacgcaatcggacgcaccagatccgggtggttgctatagatcactttgttggtattcagatcaacaatcatcgcgctaccggaggcaatttccggttgactagcggtggtagcggctgccgttttcgcaacggcctgcggtgcaaaaggcacagccagcatcagggccaggctaaataaagaaactcgaaatttcggcatgatgagcattcagatagtggttcacgcgcacgggttgcgcaccgccggagtaaggatttactgaggctagcgacgccatcataacgagcaaaaagtgcgatcgtcaaaggagaatcgtgaggaaatgctgcattgctgacatttacgccagcaatgcaacgtcaaagaactttttagaacaaacgataaccgtagccccatagtataacggttagggcgagcagcacttccagtaccagcacgccaatcgccagcgtgctactagagaagctaaggccttcctctttgttgatattcaggaagctcggaataccaaggtaaagcaggtagccggtgtaaaacagcgccaccgtgccgaccagcgcacacaaccagaccagtggataaagcgccaccagaccgcttaaaaacagcggagttgcaacgtagcccgcgaagaccatgcagtgcgcaagactcggacgctgcggataattacgcgccatccaccagatgacccgccccatcaccgcgaccccagccagcataacgccgtaaaacaagacagccagcgccagtccggtaaaccaggataacttcaggatagtgccatcgccaaaattccagccaatctgtgtagtgccaatgaaggcgcaaatcaccggaatcgccgccatcagcaaaacgtggtgggtgtaatggtgagaaatcgtttcgttttcgcgattaatcacctgcatttcacgatcgggatgggaaaacagtccccagacatggctcataccgcccccttgttgtgagttcatgaacctgacagttcaagtataagtcagcttgtgattattttttgttcgcccatgtaattttcactgtctgatgaacgtcctttttcagcgtgaatgattcacagggtgtatgcttactggcaaccaaagggagacagactggcctatggatctcaatacacttatcagtcaatatggttatgccgcgctggtgatcggtagcctggcggaaggtgaaaccgtgactttgctgggaggcgttgcggcgcatcaggggctattaaagttcccgctggtggtactttctgtggcgcttggcggcatgattggcgaccaggtgctctatctgtgcgggcggcggtttggcggcaagctgttacgccgtttcagcaaacatcaggataaaattgagcgggcgcagaaacttatccaacgccatccgtatctgtttgtcattggtacgcgctttatgtatggctttcgggtgattggcccgacgctgattggtgccagccagctgccgccgaaaatctttctgccgctgaatattctcggcgcatttgcctgggcgttgatttttaccactattggttacgctggtggtcaggtgattgcgccgtggttgcacaatctcgaccagcatttgaagcactgggtctggttgattctggtcgtggttctggtggtgggcgtgcgctggtggctgaaacgacgcgggaagaaaaagccggatcatcaggcgtaaaaccattgccctggataaggcgttcgcgccgcatccgacatccggagtaccatgcctgatacgacgcttgtgcgtcttttcatgccgaccaaaatattacccaatgaaatatccacgcacctcactgcgttattctgggttgaactgtggattcgccaacataaagccgccatccactatcaagctctgcccggtggtgtaatttgcgccctcgctacaaagccacaccaccaggctggcaatctcatgcgttgcgccaaaacgccgcaagggaatgctaggctccgcgtcgggcttcacgtcgctgtcatccatgccattcattggcgtggcgatcgccccaggcgcgactgcgttcaccaaaatcttatgcctgaccagctccagcgccatcgctttggttaacccaccgagcgcatgtttagcggctgtgtaggcgctggcatccggcagcggcgtatgttcatgtacgctcgtaatgttgatgatgcgaccgccctgcccttgtttcaccatctgacgagccgcaatttggctgcataagaatgcaccatcgacatcaacggtaaaaatcttgcgccactcatcaaaagccatatcaagaaacggcgctttggtcattgcacccgcattattcaccagcacatcaatgcgccccagccgttgaatgagtttctccagcgccagtgccccttctggtagattgccgagatccagctgcacgatctccgcacgtacgccgtggctaactacctcacgcgcggtatcttttgccccttcttcatcactgtgccaggtaataccaatatcaaacccctgctgcgccagtaataacgcgcactctttgccgatcccgctatcggaggcggtaataatcgcaacctgtgccatcgagttctccacttaacgctgaataaacgttaagtatagaaggcgcatatcatcagcgtttgtaccccccgcccaacgcaccagtgagttgaatggaggcatccagccactgcccttgcaataacaggccattggcccgctcacgcagcgcggggattctggcttcgctgacgcgggaaccagcaatgatgcccgcgttaaagcgcgcctgcgcaagacctaccacacgcaaggcatcgcgctcaatttgcgcctgatgctggtttttctccgccagtgtctgaacctgactggctgcccgcgccacgtcattcaccgcttcaaccaccgctttgttgtagctggcgatagacaagttgctttcggcttttgcgatatcgagattggcgttaagacgaccactatcgaaaatgggtagcgtcaggcctgccgtaacgcccatttgctgcgcggaatgacggaacagatcgcttaagtgcaacgcatcctgttgcaggaaggccatcaggttgatgtcaggataaaatgccgcttttgccgcatcaatggtgcttaggctactctcaacgtaccagtgcgccgcctgcaaatctgcccgccgggccagtaaggagtaccccagttcatcaggaagctggcttgccactttcggcaacgcgaccggtttaagcttcaaactctttgtctggttatttgtaagtgcgcttaaccgtgcctcaataattttcattttccccgcgacatcgttgagctgctgccgggttttgctggcattaatatcggtttccacaccttcaacactagaagtaatcccgttctgatatagctggcgatcggtcgcgataatggtgttctgctctttttctatttgctgcaagaccgtgtttaacgccgcctgggtttgccactcccagtacaggcgggctacgctgccagccagcaattggcgggtttgctcgcgttccgccgcccgtgctttaaccgtacccaggcgggcagtaacctccgcccgattctttccccagatatcgagatgccagcccgccgttaagccaaaagtaccgttggtgtaccacgggccggtcgtacctgcggccggatcgttcagagcaaacggccccattaagccttctgcgctcattttttgccgctccatatccgccgaaaagtcgatctgcggaccatcctgagtggcaactgccttcgcctgggcttcagctagctgaatgcgctgttcagccacctgcatatccggtgcgttctgtagtgcattgttaattaaggaagactgttgattatcgtgatactccagccaccattggctgtctggccaaccattttcagcgccgtgggtaatgcggtgtcaacttgtgcagcgggcgtttgctggcttaacgcctggcgggtttcatgcataggcgcacacccggccagcatcagtaacagcggaaaacaggcgatggctggataaaaggaatcacgattcatgggggaataatcaggtaagaaaaggtgcgcggagattaccgtgtgttgcgatatattttttagtttcgcgtggcaatacatcagtggcaataaaacgacatatccagaaaaatatacactaagtgaatgatatcttccgatttatcttaatcgtttatggataacggcaaagggcttcgttttttcctatacttattcagcactcacaaataaaggaacgccaatgaaaattatactctgggctgtattgattattttcctgattgggctactggtggtgactggcgtatttaagatgatattttaaaattaattaatgtcatcaggtccgaaaataacgagaatatttcagtctctcatcctgttgcgctcctgtcatgtgcattgcttcatataatcactggcgcaaggagcgcgcagggggcggccaatcgccgccgccccctgcacccccgggctctggcgaacaaaatcgccgctgcgcggtgccctcggcttatcccttacggctaccgggtcgggcgcgaggtaacatccctgtaaaacgcgccctcagcccacatccatgtgggctgccccggccttcagggaacgcctcggcaattttgacgccaccaaacaaccgtgcggcctattgataaagagctaacacattgtcaaaaaacatcactatggttttttagagtttctcgatatcaattgcctgaatagcccttgcaatatcaggggaattattcaacacccgaacatgctgaaataattccgttgcttcatcgtattctttacgcaaataactcaaccactgtttaatccgcgcaacgtgatataacccggtatcgccctgcttttccagacgggtatatttttgcagcaaagcaaccacctccggccacggcattcgcggttcgttatattttaccacccggctcaggttgggaatattgagcgccccgcgaccaatcatcactgcgtcgcagccgctgatcgccatgcattgttgcgcgctctgccagtcccagatttcaccgttggcaatcaccggaatattcagccgctggcgaatatcgccaatcgcctgccagtcaatatgctccgcgcggtaaccctgctctttcgtccgcccatgcaccaccagctccgtagcgccagcctgttgaaccgcatcggcgatttcaaatttcttctcaccgctgtcccagcccagacgcactttcacgctgacgggcaaatgcgccggtacagcttcacgcatcgcttttgcaccctggtagatgagttcaggatctttgagtaacgtcgccccgccgccgctaccgttaaccgttttgctcgggcagccgcaattgagatccacgccccaggaacctaactccaccgcacgggcggcgttctctgccagccattgtgggaactgacctaacaactgcacgcgcaccagcgtaccagatggtgtccggctggcgttttgtagctcagggcaaatgcgatgaaagacttttaccggcagcagttgatccaccacgcggacaaactcggtgatgcacagatcgtagtcgttaacttcggtcagcaattcacgcaccagagagtcaagcactccctccatcggtgccagtaacacacgcatatcatcacccgcaaaaaaatgaggcgctatgttagcgcctatggtcagcggattaaaggtctgcaaagagggattgctgcaaactgcaatccctctctatgcttgatgtatgcctgagttcgctgcgcattgcgtaatgccggggagcgaaaaaataagcgctgatttcttaatgtgatcggtagcacgttttacgaattaattgtatgatgaatccatctcatctggggtgttgattatgagtaagacactgaacattatctggcaatatttacgcgctttcgtcctgatttatgcctgcctgtatgcaggcattttcattgcttccctgctaccggtaaccattccgggcagcatcatcgggatgctgatcctgtttgtcctgctggccttgcaaattcttccggcaaaatgggtcaatccggggtgctacgtactgattcgctatatggcgctattgtttgtgccgattggcgtaggcgtcatgcaatattttgatttgctccgcgcacagtttggcccggtagtggtttcctgtgcagtcagtacgctggtggtttttctggtggtgagctggagtagccaactggtacacggtgaacgtaaagtcgtaggtcagaaaggaagtgaagaatgatggcgaatatctggtggagtttaccgctgacattgattgtcttttttgccgcccgcaaactggcggcacggtataagtttcccttgcttaacccgttgctggtagcaatggtggtgatcattccttttttaatgctgactggcatctcttacgacagctactttaaaggtagcgaagtgctaaacgatctgctgcaaccggcggtcgtcgcgctggcctatcctttatatgagcagctacaccagatccgcgcgcgctggaaaagcatcatcaccatctgttttatcggcagcgtggttgcgatggtgacggggacttccgtggcattgttgatgggcgctagtccggaaatcgccgcgagtatcctgccgaaaagtgtcaccacgcctattgcaatggcggttggcggcagtattggcggtattccggcaatcagcgcagtttgcgtgattttcgtcggcatcctcggcgcggtatttggccatacattgcttaatgcgatgcgtattcgtaccaaagctgcgcgcggtctggcaatggggactgccagccacgccctcggtacggcgcgctgcgccgagctggattatcaggaaggtgcatttagtagcctagcgctggtgttatgcgggataattactagcctgatcgcaccgttccttttcccgattattctggcagtaatgggctaaaatttgcgatgcgtcgcgcatttttgatgtatgtttcacgcgttgcataattaatgagattcagatcacatataaagccacaacgggttcgtaaactgttatcccattacatgattatgaggcaacgccatgcatccacgttttcaaaccgcttttgcccaacttgcggataacttgcaatctgcactggaacctattctggcagacaagtacttccccgctttgttgaccggggagcaagtcagtagcctgaagagcgcaacggggctggacgaagacgcgctggcattcgcactacttccgctggcggcggcctgtgcgcgtacgccattgagcaattttaatgttggcgcaattgcgcgcggtgtgagcggaacctggtatttcggtgccaatatggaatttattggtgcgacaatgcagcaaaccgttcatgccgaacaaagcgcgatcagccacgcctggttgagtggtgaaaaagcgcttgcagccatcaccgttaactacacgccttgtggtcactgccgtcagtttatgaatgaactgaacagcggtctggatctgcgtattcatctgccgggccgcgaggcacacgcgctgcgtgactatctgccagatgcctttgggccgaaagatctggagattaaaacgctgctgatggacgaacaggatcacggctatgcgctgacgggtgatgcgctttctcaggcagcgattgcggcggcaaaccgtagccacatgccttacagtaagagcccaagcggtgtcgcgctggaatgtaaagacggtcgtattttcagtggcagctacgctgaaaacgccgcattcaacccgactctgccaccgttgcagggagcgttaattctgttgaatctcaagggttatgattacccggatatccagcgcgcggttctggcagaaaaagccgatgcgccgttgattcagtgggatgccacctccgcaacgctgaaagctctcggctgtcacagtatcgaccgagtgcttctcgcttaagcctggtgccggatgcggcgtgaacgccttgtccggcttgccagccctctcctggtgtcgaaattcccggcaaacagtttgccgtttcttgcgcaaaaccagcgggtaaagtagcctgatggaaattttccttagatcgagtctcctgcatgttaaagcgcgtgttcctcagcctgttagtcctgatcggcttgctgctgttgactgtgctcggcctcgatcgctggatgagctggaaaaccgcgccttatatctacgacgaattgcaggatctcccctaccgccaggtcggtgtggtgctcggaacagcaaaatattatcgtactggcgtaattaatcagtattatcgctaccgcattcaaggagcgattaatgcctataacagcggtaaggtaaattatctattactgagcggcgataacgcattgcaaagttataatgagccgatgaccatgcgcaaagatttaatcgctgctggtgtcgacccaagtgatattgttctcgattacgcaggctttcgtacgctggattccatcgtgcgtacacgcaaagttttcgatactaatgatttcattattatcacccaacgtttccactgtgagcgagcattatttattgcgctgcatatggggattcaggctcagtgttatgccgtaccgagtccgaaagatatgctgagtgtacgtattcgtgaatttgccgcccgtttcggtgcgctggctgacctttatatttttaaacgtgaaccgcgttttttagggccgctggtccctattccggctatgcaccaggtaccggaagatgcgcaggggtatcccgccgtcacacccgaacagttacttgaattacaaaagaaacaaggaaagtaattatggatgtacagcagttttttgtcgttgccgtttttttccttatcccgatattttgtttccgcgaagcatggaaaggctggcgcgcaggcgcgattgataaacgggttaaaaatgcaccggaaccggtgtatgtctggcgagcaaaaaatcccggactctttttcgcttatatggtggcatatatcggcttcggaattttatctatcggcatgattgtttatcttattttctatcgttaatattcccctctccagttaattattgagaataattattacttcacctgataagctgcggatatcacattcctaaccgcagctatttgtgaatcttttcacagtttaaattcccccgcacgcttagccttaatatcagtacattattatttactaaacgctcgccttaattacctatagcattaaggaagatcacatgccgcaacaaaattatctggatgaactcactccggcttttacgtctttactggcgattaaagaagcctctcgctgtttattatgtcacgacgctccctgtagtcaggcttgcccggcacagaccgatccggggaaatttattcgcagtatctactttcgtaattttaaaggcgctgccgagacaattcgcgaaaataatgccctcggtgccgtttgtgccagagtgtgcccgacggagaaattatgccaaagcggttgtacccgtgccggtgttgatgctcccattgatatcggccgcttacagcgttttgttactgattttgaacaacaaaccggaatggaaatttatcagcccggtactaaaacgctcggcaaagtcgcgattattggcgcaggtcctgccggattgcaggccagtgtgacactgacaaaccagggttatgacgtcacgatttatgagaaagaagcgcaccccggtggctggttgcgtaacggtattccgcaattccggttaccgcaaagtgtgctggatgcagagatcgcccgtattgaaaaaatgggcgtgaccattaagtgcaacaacgaagtcggtaacacactcacccttgagcagctgaaagcagaaaaccgcgcggtactggtcaccgtggggttaagtagcggttccgggctaccgctgtttgagcatagtgacgttgagattgccgtcgacttcttgcaacgtgcacgacaggcgcaaggcgatatcagcattccacaaagcgcattaattatcggcggcggtgatgtcgcgatggacgtagccagcacgctgaaagttctcggctgtcaggcggtaacttgcgtagcgcgtgaagagttagatgagtttccggcaagcgaaaaagagtttaccagcgcccgggagctgggcgttagcatcatcgatggattcacgccagtagccgtggaaggcaataaagtcacgtttaagcatgtacggttaagcggcgaactgacgatggcggcagataaaattattctcgccgtcggtcagcatgccagactagatgcctttgcggagttagagccgcagcgtaacaccatcaaaacacaaaattaccagacccgcgacccgcaagtctttgctgctggcgatattgttgagggtgacaaaaccgtggtctatgccgtgaaaaccgggaaagaagccgccgaggcgattcatcactatttagagggagcttgcagttgttaaattaatatttagagggagcttgctcatgttaacgaaagatcttagcattactttttgcggcgtgaagtttcccaacccgttctgcctctcttctagcccggtaggcaactgctatgagatgtgtgccaaagcctacgacacaggttggggcggtgtggtgtttaaaacgatcggcttttttatcgccaacgaagtcagcccgcgttttgatcatctggtgaaagaagataccggttttatcggcttcaaaaatatggagcagattgctgaacatccgttggaagagaatctggccgccctgcgtcggctgaaggaagattacccggacaaagtattgatcgctagcatcatgggggaaaatgagcagcaatgggaggagctggcgcgcctggtgcaagaagctggcgcggatatgatcgagtgtaacttctcctgtccgcaaatgacttctcatgcgatgggtagcgatgtcgggcaaagcccggagctggtagaaaaatattgtcgggcagtgaaacggggttccacgctgccaatgctggcgaagatgacgccgaatatcggtgatatgtgcgaagtggcgctggcggcgaagcgcggcggcgcagatggcattgcggcgattaacaccgttaaatccatcaccaatatcgatcttaatcagaaaatcggtatgccgatcgttaacggaaaaagcagtatttccggatattccggtaaagcggtaaaaccgatcgccctgcgcttcattcagcaaatgcgcacccatccagaactgcgcgatttcccaatcagcggtatcggcggcattgaaacctgggaggatgcggctgagtttttattgctcggcgcagcaacgttacaggtgaccaccggcatcatgcagtacgggtatcggatagtggaagatatggcaagcgggttgagccattatctcgccgatcagggatttgatagcctgcaggagatggtaggtctggcgaataacaatattgtcccggcggaagatttagaccgcagttatattgtctatccccgtatcaatcttgataaatgtgttggctgtggacgctgttatatttcctgttacgacggcggtcaccaggcgatggaatggagcgagaaaacccgcacaccgcattgtaataccgagaaatgtgtgggttgtctgctttgtggtcacgtctgcccggtgggttgtattgagctcggggaagtgaagtttaagaaaggcgagaaagaacacccggtaacgttgtaaaaccagagacgcatccggcatttggttcctgtcgccggatgcggcttgaacgccttatccggcctacaaaaccatacaaatcagtatgttgagcttattgtaggccggataaaacgcgccagcgttgcatccggcatttggctcctgttgccggatgcggcgtgaacgccttatccggcctacaaaaccacacagatcatgatgttatgtgcgtttatgaccgaatgcggaccacattcacatcatttcttacgcgcgtatttcagactatccagcgctacggcgaagataataatcgcccctttgatgatgtactgccagtatgggtttacgccgatatacgtcaggccatagttgatgacggtaaaaataattaccccggtcaccacgccaatcaccgtccccacaccgccgctgaagcttacaccgcctaccacgcacgccgcgatagcatccagctcatacataaagccgaggttgttggtggcagagccgatacgtccggcttctaacatcccgccaaaggcatagaacacgccagacaacgcgtagatcatcagcaggttcaggccgacgttgacaccagatacttttgccgcttccgggttaccgccaatggcaaaaatgttcttaccgaagcgggttttgttccacaacacccagacgaacgccaccgcaatcaacgcgtagaaggtgatgtaagagagacggaaactccccagcgcgacaaagccctgagcaaaggtagagaagccactgtcaaaaccagaaattgggctcgccccgacaaagtcgtaatagaggctgttgatgccatagacgatgatcatcgtgccgagcgtggtaatgaacggcgtcacgttgagataagcgataatcagaccgttgatcaaaccgatcaccgcaccaatggcacagacaatcagaataaccagcgcaatcggcatcgtcgccatttccgggaacactttgttggcgttatccatggactgcaataatgtcgcagccaccactgccgccagccctacctgacgaccagcagaaagatcggtcccctgggtgacaattaaccctgccacaccgagcgcgataataatacgcacgctactctgggtgagaatattacttaagttcaacagacttaaaaatgttgggtcctggaaaataataatcgccagcaaaactaaaagaacgacgtaaataccgccctctttcaggtaagtaagaaaacttttcttatttaacgcactcatgggaagcccctaatcttaaaggtgcaaagacgcaagacgcagaatttcgttttgcgttgttgtttttgtatcgacaattccggaaacgagaccattgctcatgaccagaatacggtctgttatccctaacaactcaggcatttcagaggagataataataatccccttgcctttcttcgccagttcggcaattaactgataaatttcaaacttcgccccgacatcaataccgcgcgtcggttcatcgagcattaatatttctggttgcgttagtagccagcgaccaataatcaccttttgctgattaccaccggagaggctaccaatttgcgtccgatgacccggcgtttttacccgcatgctatcaatcacccactgggtatcgcttttcatccggctgttatccagtaaaccaactttatttttgtagttgcgaatattggaaattaagctgttaaaaccaatatccagataggcataaattcccgtactgcggcgctcctcagttaccagtgcaaatccatggtttatggcttcgttggcattatggttattgatctgtttgccgtgcaacgttatggtgccagcgcttttctcgcgaataccaaataacgtctcaacaatatcggtacgtttcgcccccaccagaccggcaataccgaggatctcccctttatgcagatcaaagctgacatcgcgaatgctcggctggcgcagactcgtcaggttacgtacctcgaggatgacttcgcccggtttgttttctttgtcagggaaacgctggttaagagaacgcccaaccatcatggcgatgatcttgtccatcgtcagtcctgccagcggttcggtggcgatccactgaccgtcgcgcaatacggtaacttcatcacataactggaagatttcttccattttatggctgatataaacaataccgcagccgcgctcttttaatttacgaataatagtgaacagatgattgacctctttttcggttaagctagaagtcggttcatccataatcacaattttcgcgttataggaaaacgctttggcgatttcgatcatctgcatttggctaacggataatgtgccgacgcgcgcacgcggatcgatatcaatatccagttcgtcaaaaatcgctttggtttcgcggtacattttgtcctgatcgacaaacatgcctttggtgggatatcgccccagccacatgttatccatcacgctacgttgtaataccaggtttaactcctggtgtaccatgctaataccattttccagggcttcttttgcagaatggaaatcgatctctttaccctggaataaaatggtgccggagtctttttgataaataccaaacaggcattttaataatgtgctttttcctgcaccgttttcccccattaatgcatggatagaatgtggccggacttttaaattaacgttatcaagtgccttaacaccaggaaaggacttgttgataccgctcatttccaacaagtattccccggaggacggagtcgtactgctgaccatataattttaccttgttggccatacaataagggcgcagtaatagactgcgcccaatcagtcttatttcttgctgaattcagccaggttgtctttatctacgccaacataaggtacgcggaccactttgttgtcgattttccagttggtgccatcagccgcacctttaccatcggccaggtttttcgccagatcaaaggtcgctttcgcctggttgttagcatcgttcagtacggtgcccgccagtgcaccggatttcaccagcgccagcgcttctggcagcgcatcgacgccaaacaccggaatgctggacttgttgtgtgctttcagcgcttcaaccgcgcccattgccatcgcatcgttgttggcgataaccacttcgattttgttggcgttcgggccagacagccaggcgtccatcttatctttcgcctgagcggtgtcccacattgcggtatctaactgtaactgttcagttttgatgcctttatcgttcaattctttaatcacgtaagtggtacgtgcttctgcatccggatggcccggttcacctttcagcagtacgaactgaatctgaccgtctttgttcagatcccaaccctgattcgccgcccagtgtttagcaatcaaatcgccttgaataatgccggactctttggagtcagtgccaacgtagtaggctttgtcgtagctatccagcgccttacgagacggttctttgttgaagaaaaccaccggcacgttttgcccacgcgctttctcaatcaccgtacccgcagctgccgggtcaaccaggttgattgccagtgccttcacccctttcgccagcaatacgtcgatctgatcgttctgcttggactggtcattctgagaatcattcatcagcagctgaacatctggcgcggctttcgcatcttgctcaatagccttgcgcactacagacataaagttatcgtcgtacttatagattgttacaccaatgcgagtatcagcagcgtgtgcagcggcaccgaataacatgctggccatcacagcagacagggttaacaccttcttattcatggtatctccggtttttcttatgcagggtagtgcttgagataaatgctcggcggggcagtagagttaatgaagtgttactgaacgccgaagctcactttttaaaattcgttcttccatgcccggtaacgctccagaaaacggctttaattgttgttatgacgctgttacctcggcaaaagtgattattcactgttacatacgggttacaacgttaaaacggtgcaatcatagctatcacattgttaagatactgtgaaatcactcacagattgaaagcggttacatcgcctgatttgtactgttagtgatcgccgccgcattctggcgtgttgcgacagaatggcgacgcactaacgtcggcataaaacagtggctggcacgaggatcaatattgcctgctgccccctgcaaggccagttcggtggctaatttcgccatactagcaatgggataacgcacggtcgttaattgcgggtcggtgtaacgggcgatgggaatatcatcgaaaccgatgatactgagatgtaacggaatcgcaatgccattatcttttaatgctgtcagtgcgccagcggccatattgtcgttataagcaaatacagcggtaagttgtagattgcgccccagcagttcaaccatcgccgcctcaccgcccggcatgtccggcgtaccagcgccaatccagctttccggcggaataatatcctgctctttcaacgcactcatccagcctgctttacgcatggcgtcatcttcaatgccgtggctggaagaaagataaccaatacgttgatgaccgttattcagcaacatgcgcgtcgccattcgggcaccgctgagattatccaggcaaacgcaacgatgggcgtaccccggcacaacgcggttgattaacaccataccgggaatgttatccataaattgcgccagttcatcgtcactcaatgctttactgtgaacaatcaacgcattacaacgctggcgaattaacacctcaatggcgtgacgctctttttccgcttcatgatagctattgccgattagcacgtatttctgatgctgctgagcgaccagatccaccgcttttaccagcgcgccgaaaaacgcatcagaaacgtccatcaccaccacgccaatggtgtcgctaacctgagttgccagcgcctgggcattggcgtttggccgataatccagctcactcacggctttcattactgcttcacgcgtgtcggcactgaccagcgtgctgttattgagcacccgggaaaccgttgccacagagacgccagcctgacgcgctacatcacgaatggtgatcatattcactacctgttatgagattgcagtaaatgactgcttgctggcggctattttgtcagcactgaatacaggacttcgtgaatcgagtcacagcaatggaaacggttacagccgttttgttaacgaatgtgatccagatcgttatctacttgttttagatattgccggtccggcagcacgcaaagttaactgacgccagagccattccaccggcccctggcggaagtaacgcagccagataacagagaagaggatattcgccagccataccggaataacaaacgccagcagctccaggcggtcaaaatgcataaacaaaccgaggtggtaaaaaagcgtggtacaaatcagcgtttgcaatagatagttggtcagcgccatccgtccgacgcaggcgatcgcaagcaccagcttaaagcggctcaattgcggccagaagccataaaacaggctcgcatagccaatcgcctgaaacggcgcactcagttcccgcggcatttgaagtaagaaggcacaccagcgatacgcccagtccagctgccattgcagggcgatggcaggaaggttaatggtcaccccaatcgccaccagcacaaaaccagtacgacgatagtgacgtaagctgaactgccctttcagccagccgctgcgcatcagcgccgcaccaatgagcatcatccctgccagttgccagccatactgtgcgcccagtgccagtaaactgttgccaacaccatcggcacgattactgatcgcttcaacgccgccgtgaagcttccagtatttttcatacaaaatagcgcttgcatccggcgtccaggcgcggctggtctggctgtcggaaatcagccccaataacagcaaaacgccaagccccaccagataaagcatgacgcctgtattaaacaggctttttacgcttggcgcatcgcgcaccagccgccagcagattaagcccaccagcccgtaagccagcaaaatatcgccgtcccagaacaataaaccgtgaataaagcccaacaagactaacagcgttaaccggctctggatccagcgtctgccacggggcagcaacatttgcaggcccgcaccaaacagtagcgcaaaaagcgtgaggaatttcacctggccgatgagatcaagaaatgcccaagtccatgcatcccgcggcgtaatagcaccgtaccaggcgggattgagataagccgcctttggtagcccaaaggcgctgatgtttaatagcaggatccccagaatggcgacgccgcgaacaaaatcgagcgtgacgttgcgctccatggttcctgccttttaatcagttgtgatgacgcacagcgcgcagaaactcgtggcgcgtattctgactggatttgaacaatccaccaagagaggtcgttgtcgtggcactggttgcatcgcggatgccacgcgccttcacgcagtaatgcaccgcgtcgatgctgacagccacgttattggtgcccagcagcgtttgtagcgcaataagaatttgctgcgtcagacgttcctgcacctgcggacgctgggcaaagaactgcacaatgcggttaattttactcagaccgatcacgctatctttcgggatataggccaccgtcgctttgccatcgatggtaacaaaatggtgttcacaggtgctggtcagagtgatatcgcgcacggtgaccatttcatcgaccttcattttgttttcaatgagggtgattttcgggaaattggcgtaatccagaccggagaaaatttcatcgacatacattttagcgatgcgatgcggcgtttccatcaaactgtcatcagccaggtcgagattcagcagctgcatgatttcggtcatatgaccagcaataaggcttttgcgcgtttcgttatccatttcatgcacgggcgggcgcagcggtgtttccagtcctcgcgcaactaacgcttcatgaaccagggccgcttctttactgagacttggcatttatgatttctcctgcaggtgtgacgcctccgccctgcgtgggggcaaagttattaagctgatttacagcctgattattgtgcgtgaggcggcgcacataatccagtattcacagcgataattattgtaattgccgctgcctttcatcagcagatgttaaaacatcgttatgcaaatacggaagtgaaagttactcacagcacattgaataaacggtatgatgaagaaattgcaaacaacacaacaaggagccacgcatggaaatgctcgaagagcaccgctgttttgaaggctggcagcaacgctggcgacacgactccagtaccttaaactgcccgatgacgttcagtatctttctccctccacctcgtgatcacactccgccaccagtgctgtactggctttccggattaacctgcaatgacgagaacttcaccaccaaggcgggtgcccagcgggtagcggcggaactggggattgtactggtgatgccagacaccagcccgcgcggcgaaaaggttgccaacgacgatggctacgatttaggccagggcgcaggcttttatcttaatgccacgcaaccgccgtgggcgacgcattaccggatgtatgattatctgcgcgatgaattaccggcgctggttcagagccaatttaatgtcagcgaccgctgcgccattagcggtcacagtatgggtggtcacggtgcgctgattatggcgctgaaaaatccgggtaaatacaccagcgttagcgcctttgcgccaattgtgaatccgtgcagcgtcccgtggggaatcaaagcgtttagcagctatttaggtgaggacaaaaatgcatggctggaatgggacagttgcgcactgatgtatgccagtaacgcgcaggatgcgatcccgacgcttatcgatcagggcgataatgatcagtttcttgccgaccagttgcaacctgcggtactggcagaagccgcgcgccagaaagcgtggccgatgacgctgcgtattcagccgggatatgatcacagttactacttcatcgcctcttttatagaggatcacctgcgcttccatgcgcagtatttactgaagtgaaagtccgcccggttcgccgggcatcttctcatcagaagcgataatccactgccataaagtaacgacgtccgtcttcgttatagctgtagtcgtcacgactgagatccttgtcgccaaggttcagcacgcctgcgcgcagtttgacgtctttagtcacctgccaggccgcgccggtattccagatggtataaccgcccggtgttttagccgtcgcgctgtcggcgcgtttctgcccggtatagtgcccagaaacatagaaactccagtcttccagcgccagcggtttccagtccagcgtaccgttagcagtatggaacggcagatcggatagcggtttgttttcgccgttgctgacatcacgaccatcgttgtaggtgtagttgatgctcagtttccattcatcgttgaacggaattttcagttcggtttccacgccctgaatacgagctttgttaacgttgtagtagctaaataccggtatgcgccgtccgttagcgcccgtctcaaaaccaacaaagttttggtagcccggtgcagcgttgacgtcagacgtacggctgatgctgatacgatctttcacatcgttacggaaaacggtaacgctggattcaaccccttccagccagccttcttcacccatgtagtaaagccccagctcccaactttcgctggtttctggtttcagatccgggctacccacaatcttacatgcgccacggcaggaattgctcgtccagtcagggctaagttgcaacagagaaggtgctttaaatgccgtcgcccagccccctttcaccgttacggtgtcggtggcgttataaaccaggtaggcacgcggactccagtgttcaccgtaggtttcgtgatcgtccatacgcacgccggtcgtcagcgccagcggctcgaagatccgccattcatcttccacaaacagcgcgtactggctggcagacgttttggagctggttcccccggtcaggttcaccgcatcgctaagtttgtcgtgacgccattcaccgccaaccgtgagaaactgattaatcgccgtcagcggcaacgtgtatttgccgtcgaccgtattgctttcggaagttatcgggctgctgttgccagggtttttgttctcgactttctcaccgtagtatttcagttcgctggtgccgtaatcccaacgcccattatggctgacggagtagttctggcgttccaggcggtttttgtccaggctgtcggaatcacgatcctgacggtcgaaaccgtatccggcagtaaaatcgtgattttgattcggtgtccaggcaaattcgacattgccgtcgcggctggagaatccttcaatacgcggcgtttctccggtatcggtggtcgtactgttttgcgggtcatccttttcacgttttgccaggctgccgtaagctttcattcccagcacaccatcaattaatggtccactggtaaagaactgaccgttataggtgtcaccgcgatcgcgatgttcctgaatggtggtatcgacggtaacggtaccgctccatttctgaccgatttttttggtgatgatattcactacaccgccgagcgcatcggaaccgtacaggctgctcatcgggccacggaccacttcaatacgttcgatggaatcgaccgggatccagttcagatcgaaatcattgtggcggaagacggcattgcgggagttcacgcgtttaccgtcgacgagaatcagggtatagctgctgtccagaccacgaatactaacgcccttacggttatccccttcgttcgtcagttgtacgccaggcacttctttgaggacatccttcagattctgtaccggttttcgctgcaggtcttcctgggtaatgacgctgatactggcaggtgcatctttaagattttgttccacggaagatgcagtgacaaccatcgtttcgccatcatcatcgaccgctaacacaggccatgcacaagaaatagcggacaaacacagcccgacccgtacgaaagggttcaacctaaacattccatatctccatgaggtaactacgaaaataaaatgggttatcgctcacatcttcttcacgtccccttgcgtacggcagcatcgcggtggacttattttttatgcaggtgatcatcccagaaagccggaacagcctctgatttgtcagccttttttgattgcggcgtaacgataatgcaaacgataacaattatcaatccaaatgttaaattttatatccgcatgatttgtcagggaaatggaattgaaaaagccctctcggttgagagggcttagcaaggaagggaggaaacttatttcttatcgttctgcgggaacttcatttcgctgtagcgtacgaagtgagttcctttaatcagcttgtagccgaaccaaataatcaggaacagcgggataccaatatacgttgccgctacgccgccccagtcaatagtatctttcaggaacgcttcgtagttctggcccaaagtgataatcagacacagaatgaatgcgaagatcggccccagtgggaagaaaccactacggtacggcagatcgttaatgtcgtgtccctgcaatacgtaaccgcgacggaagcgatagtggctaatggcaatccccagccaggcgataaaacccgtcatcccggaggtgttcagcagccacaggtataccgtctggttgccaaacatggaggtcaggaagcacagaccggcaatcaccgtcgtcgcatacagcgcattacgcggcacgccaccacggctcagtttagcgaaaatgcgcggcgctttaccgtcacacgccagggtgtacagcatacgagtagacgcatacataccggagttacccgcactcagcaccgccgtcagaataactgcgttcatcaccgccgccgcagagagcagacccgcgtgctggaacaccagggtgaacggactaacgctgatgtctttaacatcgttacgcagcaggctcggatcggtgtacggaataatcaggctgataatcaggatcgcgaacacatagaacaacaggattcgccagaacacctgacgtaccgcgcgtggaatgtttttcgccggatcttcggactcgcctgcagcaataccgatcagctcggttccctggaaagagaagccgacaatcatagctacgccgatcatcgccgcaaaaccaccagcaaacggcgcttcgccgattgtccagttgctccagcccgcaggctgcgcgcctttgaagataccgataatcatcagcacgccaacgatgataaagacaataactgtcgtgactttgatcagactgaaccagtattccgcttcaccaaagccacgaacactgatgtagttcagcaggaagataacgccgaggaacaacgcactccagatccagcccggtgtatccgggaaccaccagctcatgaccagctgagctgcaaccaggtcaacggcgatagtcaccgcccagttgtaccagtagttccagcccagcgcgaagccaaagccttcttcaacatagttctgaccgtaagtggcaaagctaccggaaaccggcatatatgcagccagttcaccgagactggtcatcaggaagtaaaccatcaggccaatcagcatatagctgagcaatgccccgcccggacctgcctgagaaatcgttgcgccagaggcaacaaaaagacctgtaccgatggaaccgccaatggcaatcatcgtcaggtgacgcgcctttaattcacggcgtaagcccggcgcttctgtggttttagtttcggaaaccatacaaaaatgctatccatcttaaaaatgaggcgcgattgtagcagacgattggcaatccttccggcagaaatacacggttataagacaccttcatgatcgcccagggattataagtaaagcagccaatctcttttctggcgaatgcatgctgaaggcgctgcgtcacgaaatcgacacagcaccagcatgttcttgtacagcaacttaacgcggcacatttgcgggatcgcaatagtccagaaagcgccgtagcgcgttggaaaggtgtttttgccgatgatgtatacgccacaacgtacgcatcaggcgcggcagagggaccgcaacttcacttaatgtgcctgcctgcaattgatcttcaatcacacgtcggctcaggcaactaattcccaacccatgacgcaccgcatgtttgattgcctcggagttacctaattccatcgccatctcaaacttcggtaaatgactcagcaacagataatcgacaatctcccgcgtgccggaaccgcgttcacgcaggatccacggcgcagcggccagctgttctaaggtgaccggaccacgggccaacgggctagtcggcgcggcgaaaaccaccagctcgtcttccagccacggttcagaaatgatttcagtgctgtggcacggtccttcaataaagccaatatcaacgcggaaatccagcaccgcttgcatcacgtcctggctattcccaacgctaagttcaatcggcaactgcggataatcatggcgataacgggcgataactgcaggcagaatgtagttaccgatggtactactggcatagatacgaatcgcgccgttgtcttcgcgaaacagttgttcgatttcaaccgcctgttcaagcaatgccaacgcacgcggatagagcagccgcccgtgttcattaacaaccagtcttttccccacgcgatcaaacagttgcacgccaagctgcccttccaggtcggtcaaggctgcgctcactgcactttggctcaacgccagcatcacgctcgcctgggtggtacttccacttttcaatacttctgcaaaaacttccaactgccggagggtgatgtgcatagtcgcttaccacttataaagattaattataaatatataatcaattttatttttaaaccagttagtcgtaaccttatgcccggttaaaggagagggttatgacgaatatcaccttacagaaacaacatcgtacactgtggcattttattccggggttagccctgagtgcagttatcaccggggtcgccctgtggggtggttccattcccgcggttgcgggtgccgggtttagtgccctcaccctcgcaatcttgttggggatggttttaggcaacaccatctatccgcacatctggaaaagctgtgacggtggtgtgctgtttgccaagcaatatttattacgtctgggtatcattctttatggcttccgtctgacgttcagccaaattgccgatgtcggtatcagtgggatcatcattgacgtgttgacgctgtccagtaccttcctgctggcttgcttcctggggcagaaagtgtttggtctggataagcacaccagctggttgatcggtgccggtagcagtatctgtggtgctgccgcggtactggcgactgagccggtagtgaaagcggaagccagtaaagtaaccgtggctgttgcaaccgttgttatcttcgggaccgtcgcgattttcctctacccggcgatatatccgctgatgtctcaatggtttagtccggaaactttcggtatctacattggttctactgtgcacgaagtggcgcaggtggtggcggcaggtcatgccatcagcccggatgcggaaaacgcagcagttatttccaaaatgctgcgcgtgatgatgctggctccgttcctcatcctgctggcggcgcgtgttaaacagctgtctggggcgaacagcggcgagaaaagcaaaatcactattccgtggtttgccatcttgttcatcgtagttgccatctttaacagcttccacctgttaccgcagagcgtggtgaacatgctggtaacgctggataccttcctgctggcaatggcgatggcggcgctgggtctgaccactcacgtcagcgcgctgaaaaaagctggggcgaaacctctgctgatggcactggtactgtttgcctggctgattgttggtggtggtgcgattaactatgtgattcaaagcgtcatcgcataaaccactacatcttgctcctgttaacccgctatcattaccgttttcctccagcgggtttaacaggagtcctcgcatgaaatacattggagcgcacgttagtgctgctggcggtctggcaaatgccgcaattcgcgccgccgaaatcgacgcaaccgcgtttgccttgttcaccaaaaaccaacgtcagtggcgtgccgcaccgctcacgacgcaaaccatcgatgaattcaaagccgcctgtgaaaaatatcactacacaagcgcgcaaattcttccccacgacagttatctgattaacctcggacatccggtcactgaagctctggaaaaaagccgcgatgcctttatagatgaaatgcagcgttgcgaacagctggggctttctttgctcaacttccaccctggcagccatctgatgcagattagtgaagaggattgccttgcgcgtattgccgaatccatcaacattgcgctggataaaactcaaggtgtgacagcggtgatagaaaacaccgccggtcagggcagtaacttagggtttaaattcgaacatctcgcggcgattatcgacggcgtggaagataaatcccgcgtcggcgtctgcattgatacctgccatgctttcgctgccgggtatgatttgcgtactccagccgaatgcgagaaaacattcgcggattttgcccgtactgtcggctttaagtatctgcgcgggatgcaccttaacgatgcgaaaagcacctttggcagccgcgttgaccgccatcatagcctcggtgaaggcaatatcggtcatgatgcgttccgctggatcatgcaggacgaccgtttcgacggcattccgctgatcctcgaaaccatcaacccggatatctgggcagaagagatcgcctggctgaaagcgcaacaaactgaaaaagcggtagcctgaagatgaataaccgggaaaaggagatccttgcaattttacggcgtaacccgctgattcagcagaacgaaattgcggacatgctgcaaatcagccgtagccgcgttgcggcgcatattatggatttaatgcgcaaaggccggattaaaggcaaaggttacattctcaccgagcaggaatactgcgtagtggtggggacaatcaatatggatattcgcgggatggcggatatccgttacccgcaaagcgcttctcatcccggtacaattcattgcagtgcgggcggcgtgggacgcaacatcgcccacaatctggcgctgttaggccgtgacgtccatttgcttagtgtgattggcgatgacttttatggcgaaatgctcctggaagaaacgcgccgtgccggcgtgaatgtctccggctgcgttcgtttgcatggtcaaagcacaagcacgtatctggcaattgccaatcgagacgatcaaaccgtgctggcgattaacgatacccatctgctggaacagttgacaccgcaactactgaacgggagccgcgatttacttcgtcatgcgggcgtggtactggctgattgcaacctgacagccgaggcgctggaatgggtctttaccctcgctgatgaaatcccggtgtttgtcgataccgttagtgaattcaaagcgggcaaaatcaaacactggctggcgcatattcacaccctgaaacccactttaccggagctggaaattttatggggacaggcgatcaccagcgatgctgaccgtaataccgcagtgaatgcattgcatcagcaaggtgttcagcaactgtttgtttatttgcccgatgagagtgtttattgcagcgaaaaggatggagaacaatttttgctgaccgcgccagcgcatacgacagtagacagttttggtgctgacgatggttttatggcgggcctggtatatagctttcttgaaggatacagtttccgcgacagcgcccgttttgcggtagcctgcgcggcaattagccgcgccagcggcagcttaaacaaccctaccctgtctgccgataacgcgcttagtttagtgccaatggtgtaacaatgttgccggatgcgacgcttaacgcgtcttatccggcctacaaatcaggcaatttcagcaagtaaatgtaggcctgataagcttgcgcatcaggcaatgacactcaagctaaaccaataaagaacccggcaatggtcgcactcatcaagttggaaagcgtcgccgccgccagcgcccgtaaaccaagctgggcgatttccggcgcacggtgtggcgcaaccgcagaaaacgcccccaccaccaccccgatagaaccaaagttagcgaaaccgcacaacgcgaaggaaataatcgccacagttttagcatcgagagtgccagccgtttgcagatagggactgaaattgagataagcgacaaattcatttattgccagtttctgtccaatcaaactcccggcaagattcgcatcactccagtccacacccatcacccacgccagtggagccagcaggtaacctaaaatggactccaggctggcatgttcaaaaccaaaccagccaccaacgccgccgataataccgttaatcaacgcaattattgcaacaaatgccatcaccactgttgccacacctgcggcgattttcagcccggtcattgcccctgtcgcagcggcttcaataatgctttttggcggtgtttcggtgaaagagaggttattaaaggaaacctggctagattccgttgccgggcttaacaggcgggcaaacaagatcccgccagggatcgccattaaacttgccgccagcagatattccacaggcacgcccagtgcggcgtaaccaatcattgtgctaccagcaatgctggccatgccactacaaatcgctgtaaataattcattgcgattcagacgatcgataaagggtttgacgattgccggaatttcgttttgcccgaggaaaatggtggtgaccgcgacgaaactctcgatcttgctgatatttaatgctttctggaagataccgccgagaattcgaattaaaatccccatcacaccgatgtagtagagaatactcaccagcgcggtgacgaagataattgccggtaacaccctgaaaccaaagataaatcctgcaccatcaaataaggtatccattttcggtccgaccagagaaccgaagataaatgcgctacccgcgtcgctgtacgccatcactttatgcacgccaaaagcgactttttcagcgacccaacgccctggcggtaaccaaagcataatgccgccaatcacgacctgtaacactaacgccgcgccaacggtacgcaggctgatcttcttcttgtttacactcagtaaaaacgcaatcgtcagcaataccaccattcccagaacacttctcatgacatccatagtgattatctcttcatgtcatattgggcgacggctttctgcccatcagaaatagccaggcctgcatcttgcgataccggcccggcttgttatcaacacttaatgggttttgatgtagccgcgcacgcactcttcgactaatccccagaaccagtctgtatcaatagtgatgccgactttggtattggcgggcttgccaagaacgcccagctcgtcgcagacggtacgcccatagcaagggccactgttgacgtccacttcgacgtacatctcctgggttttaatgccatcagggttaatcagataaccgatgcaggtggcgtcgtgcaccgggccgccagcaaggccgtagttttcgaactgcgttttgagagtgaagttcatgatgtcgctgaacagctctccggcggggccgcctgccctttccatccgagcaatcacgtccggggtgcaaacggtctggttggtgagatcgaggcccatcatcactaatggaacgccggaggtgaacactacgcgtgcggcttccgggtcggcaaagatgttgaactcggcagatggcgtgaagttgcctgtaccgtaagcgccgcccattagcacaatttcacggattttgggcaggatcgcgggttgcatacgcattgccaccgcgatattactaagcggaccaaccggcaccagagtgatatcgccatcgcttgccatcagggtatcaatgatatatttcaccgcatgagtgctttctgcctggcgggtcagcggctcgaataccgggccatccagtccggtttcaccgtgaatattatcggcaacgatttgttgacgcataatgggctgcggcatccccgcataaaccggaacattaatctccagtttctggcaaacattcaggccattaattaatgttttatcaagcgtctgattacccgctacaatagtgatgcctaataaatctattgccggatgtttcgccgccatcattatagcaatagcatcatcatgacccggatcacaatccagaataatttttctcttttccattgtttatttcctctgtttccagttgcgttattttttctacagcaaagaaaattcgaccgggccgatgattgaatcttaacaacagcgtacgtatgctaaatatgagaaatctcatagcggataaacatcgtgaaagaaatccacaataatgatcttaagcagcaattgatgagtgaatccgcgtttaaggattgctttttaacggatgttagtgccgatacgcggctgtttcattttttagcgcgtgactacattgtgcaggaagggcaacagccgtcctggctgttttacctgacgcgaggccgcgccaggctttacgccacgctagctaatggtcgcgtgagcctgatcgatttctttgccgccccctgttttattggcgagattgagttaatcgataaagaccatgaaccgcgtgcggtgcaggctattgaagagtgttggtgccttgcgctccctatgaaacattaccgtccgctgttattaaacgacacgctatttttacgaaaactctgcgtcaccttaagtcataaaaattatcgtaatattgtttctttaactcagaatcaaagttttccgttagtgaatcgcctggcagcatttatattactcagccaggaaggtgatctttatcacgaaaagcatacgcaagcggcagagtatttaggcgtttcttatcgacatcttttatatgttctcgcgcagttcattcacgacggtttattaattaaaagcaagaaagggtatctcattaaaaacagaaagcagttgagtggactggcgctggagatggacccggagaataaattctccgggatgatgcagtaaaaattattttcaatagcgcgattgccggatgcaacgcttaatacgttttatccggtctacaaatcgagcattacgccagaccaataaagaacccggcaatagtcgcactcatcaggttggaaagcgttgctgctgccagcgcccgtaaaccaagctgggcgatttccggcgcgcgttttgggctaatagcgctaaatgcgccaacgacaacaccgatagaaccaaagttagcaaaaccacaaagcgcaaaggagataatcgcaatggttttcacttccagcgtgccgcccgtttgcaggtatggggagaaactcaggtaagcgacgaattcgttaatcgccagtttctgcccaatcaggctacccgcaagattggcatcactccagtccacacccatgatccacgccagcggtgccagcacatagccaaaaatactttccagagaggcattggcgaaaccaaaccagccgccaattccgccgataatgccgttgatcagcgcaataattgcgacaaacgccattaccaccgtcgccacaccagcggcgatttttagcccggtcatcgcaccgctcgccgccgcttcgataaagctttttggcggcgtttcgctgaagctcagattttcaaatgtgacctggctaggctcggttgccgggctaagaatacgtgcaaacaaaatcccgccagggatcgccatcaggcttgccgctaacaggtagtcaattggtacgcccattccggcataaccaatcatcatgctaccagcaatggacgccatcccgctacaaattgcggtaaacaactcgttgcgattcatgcgatcgataaacggtttaacgatcgccgggatctcattttgcccgaggaaaatagtagtaaccgcaacaaaagattcgattttgctgatgttgagggctttctggaaaatgctgccaaggatgcgaatcagcagccccatcacgccaatgtagtacagcagactgatgagcgcagtaacgaaaataatcgccggaagtacgcgaaaggcgaagataaaacccgcaccgtcaaacaggacatccattttcggcccaaccaggctaccaaaaatgaaggcgctaccggcatcactgtaagacatcactttatgaacgcctaatgccgcctgttctactgcccattttcccggtgggaagtagagcatgatgccaccaatagcgatttgcagcagcagtgcggctccaaccgtgcgcaaactgatgctctttttattcacactcaacagaaatgctattgccagtaacaccaccatccccacaacacttctcattatatccataatgattttcccttcatgccggtaaacccggcgtcagcgccaggttttggtatgcttgatgagtacgggcgacggctttctgcccgtcagaaattaacccgcgagacgctgatattctttggcaatttcgctcgccagaatggcgttgttgaacaccagctggatgttggatttcaggctgtcaccgccggtcagttcagcaacgcgcgccagcaggaatggcgtactttctttaccaatgactccctgagcttcagcttcagctaccgcctgatcgatcgccgcattgatagtgtgttccggcatagcaaactgttccgggatcgggttcgctaccacgaggccaccgttcagaccgctttgccatttcaccaccattgcacgggcaatttcgctggcgctgtcgagacgaatgctgacgtcaaacgggctggtgcggcagaaaaacgcaggcagcgctttagtctgatagccaattaacggcacaccgaaggtttctaaatactcagtggttaatcctaaatcgagaatagatttcgccccggcacaaacaacggtgacattagtatttgccagttcttgcaaatcggcagaaatatcgaaggtatgttccgccccgcgatgcacaccaccaattcccccggtggcaaatactttaattccggcaagcgccgcaataatcatcgtactagccacagtggttgcgccattttttccggcggcaacaacaaaaggtaaatcgcgacgactaactttggtcacgttatgcccttcacgacccagtaattcaatttcttctttgcttaaccccactttcatcacgccgccaataatggcgatcgtggcaggtacagcgccctgtttacgaatagtttcttcaacttcaattgcggtctgggcattttgtgggaacggcatcccgtgagaaataatggtgctttccagcgccacaaccggttttttgttttttaaagcgtcctgcacttccggggaaatttgtaataattcaggggaaatttttaattcagacattctgcgttctccactaagcttataacgttggcaatgcttaaatcggggttattggtgtattcacaggagagcgccatactgctacatccctgtgcgaaacgaacagattcggcaaacggcattccgtctacccaacagctagcaagtcccgccatcatggcatcgcccgctccggtaacattaataacattggttttgatcggcgcagaccagccactttcaccgctgatatcgctgtaataaacgccgtcgccgcccatgctcaataccagtcggttcaggccatgttgatggaaccaggcagcaacttttgccacatcttcacgcccactcagcgcaatcccactcagggtttccgcttcaaggcggtttggcttgagagtgtggatctgatttagacggtcgcgcactttgacacatttccatgcgctaaccggatcgacaaatacgggtacgttggcggcattatccagaatccatgccagtgcctcttcactgatattacagtccgcgacaatgacctttgccctctgaataaattcaccgtgctgtgcgagatattcagctgtaatagcgttgctaatattcatgtcatttatagcaaccagcatttcaccggtattatcgagtaaacttaaataactgctcgtattttctcccggcacaatcaggcatttatcgacataaacgccagattgattggtttgcgttagcaggctttgaccataaaaatcactgcctacggcgctcagtagccaggctttgttacccagcaacgccaggttttgtgcaatattgcgccctactccaccaggcgtaaattttattttacctggattactatccgcataatttaaactttcatgactatatccggcgacatcaatattcgcgctacctataattacgacataatccttttcgcgcatagcacgtcctctggtaaaaaattaccaaccctgtcaatccacaagaatatagatactgcaaagacggtttaaacatgtgttcatatttaaacatgtgctcatagtatgcatgttttacgtaaagtaaattaccgccagagaggcaaaatgggcagatttgagcaggctcacaaaatgcgattaaatgcctgaattacaaaagcgaggaatttgtgacgggatgcacagaacagaacaataaaaaagggcagaaaataatctgcccttgaggaaataacctgagtgtttgatgaacgtttgaagtttctactgaaagataaaaccatttaaattcataaaattacattcacaaaccggtcattctctttgcgctcatcaaatgttacaggacaggaaatttctgccctgtaacacaccttttattacgctgctttcgctactgcgtccacttccggacgtttcaggaaggcataggccaaacccgccaccagcgtaccggcaataattgctaccaggtaacccaataccggcgtaatagcgccagggatcagcagaacaaacagaccaccgtgcggtgccatcagtttcgcaccaatcgccatactgattgcgccagtcagcgccccacccacgatacagcacggcagcacacgcatcggatcacgagcagcaaacggaattgcaccttcgctaatgaagcacagtcccaataccagagcggctttgccaccttcctgctgcgctttgtcgaatttgcgacgcgccaccattgttgccagacccattgccagcggtggcaccatacctgccgccataatcgccgccatcgggccataggtttgagtactcagcagacccacaccgaatgcgtacgctgctttgtttaccggaccgcccatgtcagtacacatcatgccaccgaggatcgcccccagcagaaccgcattcgcagtccccatggtctgcagccagtgagtcagcccttcgagaatgccagcaactggtttaccgatcaggtagatcatcgccagaccgaccaccagactggaaattagcggaatgatcaggatcggtttcagcgcctccatactctgtggcagtttcaattgcgtactgattaacttcgcaatgtaaccagccaggaagcccgcaataataccaccaatgaagccagaaccggtgctgaccgccagcataccgccaatcagacccggagtgaggcccggacgatcggcaatggaaaaggcaatataacctgccagtaccggcaccatcagcgcaaaggcactaccaccaccaatctgcatcagcgccgcagccaacgtacccggctctttaaacgcttcgataccaaaagcaaaagaaagcgcgatacacagaccacctgcaacgaccatcggcagcatgtaagaaacgcccgtcagcaagtgacggtatgcgcctgcactctctttcttactttcagtggtcgccgtttgagctttgcccgccggttcatacggcgttgcttcagcaaccgctttatccagttcctgcgcggttttcttcagcgccagaccggtagaggtacgatacatcggtttaccagcaaatttcgccagatccacttcgatatctgccgccacaatcaccagatccgctgctgcgacttcttcgggagtgattgcattacccgcgccaacagaaccacgggtttcaactttcacccaccagccacgttttttcgcttcggtttcaatggcttcagccgccataaaggtgtgtgctacgccagtcgggcaagcagtcaccgcaactacgcgtttcggaccgctggcggcaactggtgctgtcgcagcgaccggcgcagtgtaaggtttcgcatggcctttggcttcactcaggaacagctcagggtgcgcaactgcccgggaaatatcgcccagccagacatttttaccgttcagcgcgctgtcgttcgggatggaatcaccgagaacaatcgccatttcagcgtcgttcggattgtcgatgatttccagttttgcttttcgcgccgccgcgcccagcagggtcttcgccatataggcgcgtgcctgaccgagattagcgtcaataatcagcagcgttttcattatgcctctcctgctgtcagttaaaaggttgtaagtcgacgcgcgccatcattgcggccaactgcggacgatcggtaatacccacattgctttgacttaccgccagggctgcaacagctgtcgccagacgcagtgtgtgttcactggattcacgcatcagcaagccataaatcaggccaccaaccatagaatcccctgcgccaacggtgcttacgacatcgacactcggtggtttggcgatccattcgccggaggcattaacccaaagcgcgccttcggcacccagactaataacaacatgcgcgatgccttgttcacgtagcgcatgtgcagcttcaatcacatctttcatttcaggcagtttacggcctgcccagatttccagctcgcggcggttaggtttcaccagccacggtgccgctttcaaacctgctactaacgcttcacggctactatcaaagataatgcaaggacactgactacgcaggcgagtcatccagtcggtgaacgcttccgggctgacgccactcggtaagcttccgctgacacagaccatatcgaactgaccgagccagctcagagaatcagtcacaaagcgttcccagtcggcgggggtgacttcaaaaccgctgaagttgaagtcggtcacttcgccgtctttttccgtcagcttaacgttaattcgggtgcgcccctgtacaacctggaaacggttggcaatgcccagctcgctgaacagttgctgaaaaccatcctgattgtctttacccaggaagccgccaacggtgacatcaattcccaggtcttttaatactttggccacgttgatgcctttacccgccgcatgcagaccggtggttttcaccaggttcacttcgccgcgttcaatttccgggcagaaaccaacaaggtcataagccggattaagggtgatagtagcaacacgtctgctcattatgcgccctccccaagaccagcagcgatagcgtcgccgattgctttcagcgcctgttcagcatctgcaccctgggcggtaaagcgtaggcgatgacctttcttaacgccaagtgccacaactttcatcagactacgtccgtttgccggtttgccggtaccatcaaggtttgtcacggtaatatcactgttaaattgtttaatggtattgaccagcatggtacctggacgagcatgcaggccgtgttcattgcgcaccacaaactccgcgcttaacacgtcgtcggtcggcgcatcatcgctggtcagcagcgccagcaacgttgccgcatccgctttcagcaagcggtcagctttattgtcgagcaataaatcagcgagacgcttaagaaccgcgatgggctgatcgtcattcatcgccacactcaccagcatggctgccgtttcgccgtccacatcaaaagcatttgccgcacggcttaccgcaatcgcgctacgcagattgccttcggcgctatcgctcagccagataccctgtccgagattcagcggttgttcattgatggctttggtgacgaaagtggcgtcaactgcccccgcctctttcagacgcgcagcgttcagcgcctgaagagtcagcagatcgctggcgacgatatccagtgtcagcatttcgttgtcgagcttcagctgctcactctgcttttcgcccatcagtaatgcgcgaagttcttctgctgttgttgcactcttcagttgttcagcaacggaatcatcgctcagtacgtgggtcagctggcgtagcaggcccagatgttcatcgctgctggcagcaataccgattgccacgtacgctacctgaccgtcaccccaggtgacgccttccgggaactgaaatacctgaacgccggttttcagcacctgatcgcgggtgtcggtagtgccgtgtggaatagcaataccattgccgaggaacgtactggtttgctgttcgcgcgccagcatgccattgacgtagccttctgctacattaccggcctgcaccagcgccgcagcgacctggcgaatcgcctcttctttgtctccggccttttcgcccggatggatgtcctgtacggataactggaacatagttctcctctcttgctgaattgaaacgattcagcctctatgagaaaaaaagcgccaacctggcttagggttaaagacaagatcgcgctgaaacgtttcaagaaagcataatacttctgtttcagcacgcaaggaaagccgtaaagttatgagcaaaagtttgatgtgctgcacaattttttgccatttttcctaattgctgatgggaaaatccgttatcagcaatttcatttcagcagcgtcagcagccaatcagcaacagtgaaatggcattttgactattcgtggcgcttttgatttcgctgtctgtttattttctgacaagcagcgtaaactccgcgtcttcctcttccagtgatcgaccagcatgcataactcccccgcagtctccagcgcgaaaagctttgacctgaccagcacggcgtttttaatcgttgcctttctcaccggtattgcgggcgctctgcaaaccccgacactcagtatttttcttaccgatgaagtacatgcccgtccggcgatggtgggattcttctttaccggcagcgctgtcattgggattctggtaagtcagtttctcgccgggcgctctgataagcgcggcgatcgcaaaagcctgattgtcttttgctgcctgttaggcgtgctggcctgcaccctttttgcctggaatcgcaactactttgttttgctattcgttggcgtctttcttagcagctttggcagcaccgctaacccgcaaatgtttgcccttgcccgtgaacatgccgacaaaaccggacgtgaggcggtgatgttcagctcttttttacgcgctcaggttagtctggcatgggtcattggcccaccgctggcttatgccttagcgatgggtttcagctttacggtaatgtatctgagcgcagcggtagcgtttattgtttgcggtgtgatggtgtggctgtttttaccgagcatgcgaaaagagcttccgctggcgaccggcacgatcgaagcgccgcgccgtaaccgtcgcgatacgctgctgctgtttgtcatttgtacattgatgtggggcagcaacagcctgtacatcatcaacatgccgctatttattatcaacgaactgcatcttcccgagaaactggccggtgtgatgatggggaccgccgccgggctggaaatcccgacgatgttgattgccggatatttcgccaaacgtctgggtaagcgtttcttaatgcgcgttgctgccgtgggtggcgtctgtttttacgcaggaatgctgatggcgcatagtcctgtcattctgttgggcttgcagctgctaaatgctatttttattggcattctgggcggcatcgggatgctctattttcaggatctgatgcccggtcaggcgggtagtgccaccacgctctataccaacactagccgcgtgggctggatcatcgcaggaagtgtggcgggcatcgtcgccgagatctggaattatcacgctgtgttctggtttgcgatggtgatgattatcgccactctgttttgcttactgcggattaaagatgtttaaggcgcggtcagcatttccagatcgataagccaggtcatggcctgctgacggctgttaccgcacatttcagcgctggcttgtaagcctgcacagactttcggtcgcagtgggctggtgaaaattttacagcgttgctgttcatcaagctgaatgcagggcgtattggcgggcttgccatctggcataccgggaatagggctggaaatactaggggcagtgcaacacgccccgcaacccggacggcattccatacgttgttctcttaaggttaaccaccggattgatgagcgcgcacagtaccaccttttttgcaccagcaaaagtgcgaataccacttgcccgaaaggcccgtcgcgagtactttgtcgcgatatttttgacattttcgactacaggaatttttcgatgccaagagcgaacgaaattaaaaaaggtatggtactgaattacaacggcaaactgctgctggttaaggatattgatattcagagccccactgcccgcggtgccgctacgctgtacaaaatgcgtttttctgatgtccgtaccgggctgaaagtagaagagcgtttcaaaggtgatgatatcgttgacaccgtgacgctgacccgccgttacgttgacttctcctatgtcgatggcaacgaatatgtctttatggataaagaagactataccccgtataccttcaccaaagatcagattgaagaagagttgctgtttatgccagagggcggcatgccggacatgcaggtgctgacctgggacggtcaactgctggcgcttgagctgccgcagaccgttgatctggaaatcgttgaaaccgcaccaggcatcaaaggggcatctgccagcgcccgtaacaaaccggcgacattgagcactggtctggtgattcaggtaccagaatacttaagcccgggcgaaaaaattcgtatccatatcgaagaacgccgttatatggggcgtgctgactaacttcagccgcatgcagaaaagggatagctcaggctgtcccttttttaatttattataccaatcttctattttgcgcttcctgaacaccttacgccctcaattttcactcgttgattgatcgccctcacacttcatcgcattaacaatccagaccaatttcaattgctgtcatataactttacactgtcgttgttaattaatcgttactaagacgtgactcctatgaatacaatcgcctccgttacgctcccgcatcatgtacacgctccacgctatgatcgccagcagttgcaaagtcgtatcgttcattttggctttggagcctttcaccgcgctcatcaggcgttactgaccgatcgtgtgctgaatgcccagggcggcgactgggggatctgtgaaatcagcttgttcagcggtgatcaactgatgagccagctccgcgcacagaaccatttatataccgtgctggagaaaggtgcggacggcaatcaggtgataattgtcggtgccgttcacgaatgccttaatgcaaaactggattccttagcggcaattattgagaaattttgcgagccacaggtggcaattgtttccctgacgattaccgaaaaaggctattgtattgacccggccaccggtgcactcgacaccagtaatccgcggattattcacgatctacaaacccctgaagaacctcactccgcaccgggtattctcgtcgaagcactgaaacgccgccgtgagcgcggccttacaccgtttaccgtgctctcctgcgacaatattcccgacaatggtcatgtggtgaaaaacgcggtgctgggaatggcagaaaaacgtagcccagaactcgccgggtggataaaagagcacgtcagttttccgggaaccatggtcgaccgcattgttccggctgcaaccgacgaaagtctggtggaaatcagccagcatctgggggtgaatgatccctgcgcgattagctgcgaaccgtttatccagtgggtggtggaagataacttcgtcgctgggcgtcctgcctgggaagtcgcaggtgtacaaatggtgaatgatgtcctgccatgggaagagatgaaactgcggatgcttaatggcagccactcttttctcgcttatctgggttacctcagtggattcgcccatatcagtgattgcatgcaggatcgcgcatttcgccatgccgccagaacattaatgctggatgagcaagcgccgacactgcaaattaaagatgtcgatttaacacaatatgcggataagttaattgcacgttttgctaatccggcgctgaaacataagacctggcaaatcgcgatggatggcagccagaaattaccgcaacgcatgctggcaggtattcgcatacatcaggggcgcgaaacggactggagcttgctggcattaggcgttgcaggctggatgcgttacgtcagcggcgttgatgatgccggaaatgccattgatgttcgcgatccgcttagcgataaaattcgcgaacttgttgcgggcagcagcagtgaacaacgcgtaaccgccctgctttccctgcgtgaagttttcggtgatgatctgccagataacccgcattttgtgcaggccatcgaacaagcctggcaacaaatcgtacaattcggcgcacatcaggcgctattaaacaccctcaaaatttaacgatttctgcggttaaagcggatgaagctcaccttcgtccgctctccccttctcttttctgccttttttagccaggattaacgctcagttaacttaccagagtattgcggagccgttgtgaccaggaccaacctcatcaccggttttctcggcagcgggaaaaccacgagcattcttcatctgttagcccataaagatcccaacgaaaaatgggcggtactggttaatgaatttggggaagtcggaattgatggtgctttgctcgccgatagcggcgcattgctgaaagagatccccggcggctgcatgtgctgcgttaatggtttacccatgcaggtagggttgaataccttactgcgtcagggaaaaccagaccgcttgttgatagagccgaccgggctgggccatccgaaacagatcctcgatctgttaaccgcaccagtctatgaaccgtggatagatctgcgcgccaccttgtgcattctcgatccgcgcttgctgctggacgaaaaaagcgccagcaatgaaaacttccgtgaccagctggctgccgcagacatcattgtcgccaataaatccgaccgtacgacgcccgaaagtgagcaagcgctacagcgttggtggcagcaaaatggtggcgatcgacaattaattcacagtgagcatgggaaagttgacggtcatcttctggatttgccgcgtcgcaatttagccgagttgcccgccagcgccgcgcattctcatcagcatgtcgtgaaaaaagggttagcagcgttaagcctgccagagcatcaacgctggcgtcgcagtctgaacagcgggcaaggatatcaggcctgcggctggatattcgacgctgatacggtattcgacaccattggcattctggaatgggcgcgacttgcaccggtggaacgcgtcaaaggcgtgctgcgtattcccgaagggctggtgcgaatcaaccgtcagggcgatgacctgcacattgaaacgcaaaacgttgcgccaccggacagccgtattgagctgatttccagcagcgaagctgactggaatgccttgcagagcgcgctgttgaagcttcgtttagcgactaccgcgtaaggttgcctgcgtttttcagtaagataattagagaaaatatgattaaaaatttgccgcaaatagtgttgttgaatattgtcggcctcgcgctgtttctttcctggtatatccccgttaatcatggattctggttgccgattgatgcggatattttttatttctttaatcagaaactggtcgaaagtaaggcctttttgtggctggttgcattgaccaacaatcgcgccttcgacggttgtagtctgctggcgatgggtatgttgatgctgagtttctggctgaaagaaaacgcccctggcagacgacgtatcgtgattattggtctggtcatgctattaactgcagtggtattaaaccagctgggtcaggcattaattcctgtaaaacgggccagcccaacattgacttttaccgatattaaccgcgtcagcgaactgctctctgttcccacgaaagatgccagtcgagatagctttcccggcgatcacggcatgatgctgcttatttttagcgcattcatgtggcgttatttcggcaaagttgcaggccttatcgcccttattatttttgtggtttttgcatttcccagagtaatgattggcgcacactggtttactgacatcattgtcggtagcatgaccgtgatattgatcggtttgccctgggtgttgctgacgccattaagtgatcgattaatcaccttttttgacaaaagtctaccaggaaaaaacaaacatttccaaaacaaataactcacagtaattaacatcatcagggttatttttatagtgaggataatcctgatgatgcgcaccgtgctttcatctatcgaacgcaaaaatcattctctaagtaaatgaatggattgcatgcgtttcactcaattgtactttaattgaccaaccccgcttattaactttctgtatcactttttcttataaaaaatcatgtaaaaccgctcgccaagaccgcaccaatcgggtaatctcgaactcgttttgcctcggcggtagattatcctcacagcatataattttgtgcgttagtccacagatttggccttaaggaattgtttcaacatgcccaggtaattagtctcgtgtcgcttggcatttttttataacgatatttgtcgttaaggacttcaagggaaaacaaacaacatggtcaaatctcaaccgattttgagatatatcttgcgcgggattcccgcgattgcagtagcggttctgctttctgcatgtagtgcaaataacaccgcaaagaatatgcatcctgagacacgtgcagtgggtagtgaaacaagtagtctgcaagcttctcaggatgaatttgaaaacctggttcgtaatgtcgacgtaaaaagccgaattatggatcagtatgctgactggaaaggcgtacgttatcgtctgggcggcagcactaaaaaaggtatcgattgttctggtttcgtacagcgtacattccgtgagcaatttggcttagaacttccgcgtagcacttacgaacagcaggaaatgggtaaatctgtttcccgcagtaatttgcgtacgggtgatttagttctgttccgtgccggtagtacgggacgccatgtcggtatttatatcggcaacaatcagtttgtccatgcttccaccagcagtggtgttattatttccagcatgaatgaaccgtactggaagaagcgttacaacgaagcacgccgggttctcagccgcagctaataaaccgtttggatgcaatcccttggctatcctgacgagttaactgaaagcactgcttaggcagtgcttttttgttttcattcatcagagaaaatgatgtttccgcgtcttgatccaggctatagtccggtcattgttatcttttaaatgttgtcgtaatttcaggaaattaacggaatcatgttcatacgcgctcccaattttggacgtaagctcctgcttacctgcattgttgcaggcgtaatgattgcgatactggtgagttgccttcagtttttagtggcctggcataagcacgaagtcaaatacgacacactgattaccgacgtacaaaagtatctcgatacctattttgccgacctgaaatccactactgaccggctccagccgctgaccttagatacctgccagcaagctaaccccgaactgaccgcccgcgcagcgtttagcatgaatgtccgaacgtttgtgctggtgaaagataaaaaaacattctgtagttctgcgaccggtgagatggacattccactcaatgaattgattccggcgctcgacattaataaaaacgtcgatatggcgatcttacccggcacgccgatggtgccgaacaaacccgcaatcgtcatctggtatcgcaaccctttgctgaaaaatagcggcgtctttgccgctctgaatctcaacctgacgcctagtctcttttatagtagtcggcaggaagattacgatggcgtcgccctcattattggcaatactgcgctatctaccttttctagtcgtttgatgaacgttaacgaattaaccgacatgccagtccgtgaaactaaaattgcgggcattcctctgaccgttcggctttatgcagatgactggacatggaacgatgtgtggtacgcatttttactgggcggcatgagtggaactgtcgttggcctgctctgctattacctgatgagcgtacgtatgcgccccggcagagaaatcatgaccgccatcaagcgcgaacaattttacgtggcgtatcaaccggtggtggatacacaagctttgcgagtaacgggcctggaagtactgctacgctggcggcatcctgtcgcgggagaaattcccccggatgccttcattaactttgccgaaagccaaaagatgattgtgccgctgactcagcacctgtttgagttaattgcccgcgatgccgcagaattagaaaaagtgctgccggtaggcgtcaaatttggtattaacattgcgccggaccatctgcacagcgaaagctttaaagcagatatccagaaactgctcacttccctgcccgcacaccatttccagattgtgctggaaattaccgagcgcgatatgttgaaagagcaagaagccacacaactcttcgcctggctgcacagcgtcggcgtagaaattgctattgatgacttcggcaccgggcacagcgcgcttatctatcttgagcgttttacgctcgattatctgaaaattgaccgtggatttatcaacgccatcggtacggaaacgatcacttcccccgtacttgacgcggtgctgacgctggcgaaacgcctcaatatgctgacggttgctgaaggggtcgaaacgccggaacaggcgcgatggctaagcgaacgcggcgttaatttcatgcaaggctactggattagccgcccgttaccgctggacgattttgttcgctggctaaagaaaccgtatacgccgcagtggtaaggtgtgcttacgtcccttattattcatagtgaaagcatgccggattgcggctaatgatgagtaaaaggaaatccgttgcagatgattgtgcgcatactgctgctgtttatcgctctgttcacctttggtgtgcaggcgcaggctatcaaggaaagctatgcctttgccgtgctgggcgaaccccggtacgcgtttaatttcaaccattttgattatgtgaaccccgccgcgccaaaaggtgggcagataacgttgagtgccctcggcaccttcgataatttcaaccgctatgcactgcgcggcaacccgggcgcacgcaccgagcagctgtacgacacgctatttacgacttccgatgacgaaccaggcagttattacccgctgattgctgaaagcgcacgctatgctgacgattattcctgggtggaggtcgctattaatccgcgcgcccgttttcatgatggtagccccattactgcccgcgatgtagagtttacttttcaaaaatttatgaccgaaggcgtgccgcaatttcgtctggtctacaaaggcaccaccgtcaaagccattgcaccgttaaccgtgcgcattgagttagctaaacccggcaaagaagatatgctgagtctgtttagcctgccggtatttccagaaaagtactggaaggatcacaaacttagcgacccgctcgccacgcctccgcttgccagtggtccgtaccgcgttacgtcctggaaaatggggcaaaatattgtctattcccgtgtgaaagattactgggcagcaaacttaccggtaaaccgtggacgctggaatttcgacaccattcgctacgattattacctcgatgataatgtcgcctttgaagcgtttaaagcaggtgcctttgatttgcgtatggaaaacgacgccaaaaactgggccacgcgttataccggtaaaaatttcgataaaaaatacatcatcaaagatgagcaaaagaacgaaagtgcccaggatacgcgttggctggcgtttaatatccaacgtccggtattcagcgatcgccgggtccgggaagctatcactctcgcctttgactttgaatggatgaacaaggcgttgttttacaatgcctggagtcgcacgaacagttattttcagaataccgaatacgcggccagaaattaccccgacgccgcggagctggtgcttctggcaccaatgaaaaaagatctaccgagtgaagtcttcacacaaatctaccagccgccggtatccaaaggcgatggctacgatcgtgacaacctgttaaaagccgacaaacttctcaacgaagcgggctgggtgctgaagggtcagcaacgcgttaatgccacaacgggtcagccactcagctttgaattattgcttcccgcaagcagcaatagtcagtgggtattgccgttccagcacagcctgcaacggctgggtatcaacatggacattcgcaaggtggataacagccaaatcactaaccgcatgcgcagtcgcgactatgacatgatgccgcgcgtatggcgggcgatgccgtggcccagttccgatttacagatttcctggagtagcgaatatatcaattccacttataatgcccccggcgtgcaaagcccggttatcgacagcctgatcaaccaaattattgccgcgcagggaaataaagaaaaattactgccgttggggcgagcactggatcgcgtattaacgtggaattattacatgctgccaatgtggtacatggcggaagaccgtctcgcctggtgggataaattctcccagccggccgtgcgccccatctatagcctcggtatcgatacctggtggtatgacgtcaataaagcggccaaactgccgtccgccagcaaacagggagagtaaatgggcgcttacctgattcgccgtctgttgctggtgatcccaacattatgggcgattatcaccatcaactttttcatcgtgcaaattgcgcctggcggtccggtcgaccaggccatcgccgccattgagtttggtaatgccggagtattacccggcgcaggcggtgaaggtgttcgtgccagccatgcgcaaacgggtgtcggcaatatcagcgacagtaattaccgtggcggacgcggattagatccagaagtgatcgctgagatcactcatcgctacggttttgataagccgatccacgaacgttacttcaaaatgctctgggactacatccgctttgattttggcgatagcctgtttcgcagcgccagcgtgctgacgctgattaaagacagtctgccggtttccatcaccctcggattgtggagcacgctgattatctatctggtgagcattccgttaggcattcgcaaagctgtttataatgggagccgctttgacgtctggagtagcgcatttatcatcatcggctacgccattccggcctttttgtttgccatcctgctgattgtcttcttcgcgggcggcagctatttcgacctgttccctctacgcggcctggtttccgctaactttgatagcctgccgtggtatcagaaaatcaccgattatctgtggcatatcacgctgccggtgctggcgacagtgattggtggctttgcggcgctgaccatgctgacaaaaaacagtttccttgatgaagtgcgcaagcaatacgtggtgaccgcgcgtgcgaaaggggtaagtgaaaaaaatattctctggaaacatgtgttccgcaacgccatgctgctggtgattgccggttttccggcgacgtttatcagcatgttttttaccggcagcctgctgattgaggtgatgtttagtctcaatggtctgggcttactgggctacgaagcgaccgtcagccgcgattatcctgtaatgtttggtaccttgtatattttcaccctgattggcctgctgctgaatattgtcagtgatatcagctatacgctggttgatccgcgtattgattttgagggacgttaatgagccgactcagccccgtcaatcaggcccgttgggcgcgttttcgtcataaccgtcgcggctactggagcttatggattttcctcgtcttgtttggtttgagtttgtgttctgaacttatcgccaacgataaaccgttgctggtgcgttatgacggcagttggtatttcccgttattgaaaaactacagcgaaagcgattttggcggcccgctggcaagtcaggctgattatcaggacccgtggctgaaacaacggctggaaaataacggctgggtactgtgggcaccgattcgctttggtgctaccagtatcaactttgctaccaataagcccttcccttctccaccctcccggcaaaactggctgggaacggatgccaacggcggcgatgtgctggcacgcattctctatggcacgcggatcagcgttctgtttggcctgatgctgactctctgttccagcgtgatgggcgtgctggcgggggcgctacaaggctattacggcggtaaagtcgatctctggggacaacgctttattgaagtatggagcgggatgccgacgctgtttttgattattttactttccagcgtcgtacagcctaacttctggtggctgctggcaattactgtcttgtttggctggatgagtctggtcggcgtggtgcgggcggagtttttacgtactcgtaatttcgactacattcgtgcggcacaggcgcttggcgtcagcgatcgcagtatcatcctgcgtcatatgttgcctaatgccatggtcgcgaccctcacctttttaccgtttattttatgtagtagcataaccaccctgaccagcctcgatttcctcggcttcggtctaccgctcggtagtccgagtctcggtgaactgctgttacaagggaaaaataaccttcaggccccgtggcttgggatcaccgccttcttgagcgtggcgatattattgtctttgctgatctttattggtgaagccgtccgcgacgcatttgatcctaataaggcggtgtaacatgacgcaaactctgttagcgattgaaaatttgagcgtgggttttcgccatcagcaaaccgtacgtacagtagtcaatgatgttagtctacagattgaggctggcgaaacgctggcgctggtgggtgagagtggtagtggcaaaagcgttaccgcgctgagtattttacgcctgctcccttccccgccggttgaatatctctccggcgatattcgttttcatggcgaaagcctgcttcacgccagcgatcaaacgttgcgcggtgtacgcggtaataagatcgccatgatttttcaggaaccgatggtgagcttaaatccattgcataccctggaaaaacagctttatgaagtgcttagtctccaccgcgggatgcgtcgggaagcggctcgtggcgaaattcttaactgccttgatcgcgttggtatccgccaggcggcaaaacggctgacagattatccgcatcagctctccggcggcgaacggcagcgggtgatgattgcgatggcgctgttaacgcgaccggaattattaattgccgatgaaccgaccaccgcactggacgtctctgtccaggcgcagattttacagctgttgcgcgaactgcaaggcgagctgaatatgggcatgctgtttattactcataacctcagcattgtcagaaaactggcccaccgcgtggcggtaatgcaaaacggtcgctgtgtcgagcaaaattacgccgctacgctatttgcaagtcccactcatccttacacacaaaagctactcaacagtgaaccgagtggcgatccagtgccgttgccagaacctgccagtacgttgctggatgttgaacagcttcaggttgccttccccattcgcaaagggattttgaagcgcattgtggatcataatgtggtggtgaaaaacatcagttttacgctacgagcgggtgaaacactgggtttagtgggcgagtccggttccgggaaaagtacgacgggactggcgctgctgcgactgattaattctcagggcagcatcatctttgacggtcagccactgcaaaatttaaatcgccgccagctgttacctattcgtcatcgcattcaggtggtatttcaggatccaaactccagcctcaacccacgactcaacgttttgcagattattgaggaaggcttacgggttcaccagccgacgctttctgccgcacaacgcgaacaacaagtgatagccgtgatgcatgaagtgggattagatcctgaaacacgccaccgttatccggcggagttctctggtggtcagcgacaacgtattgcgattgccagggcattaattcttaagcccagcctgatcatacttgatgaaccgacaagtagtctcgacaaaacggtacaggcgcaaatattgacgctattgaaaagtttgcaacaaaagcatcaactggcctatttgtttatcagccacgatttgcacgttgtccgcgcgttatgtcatcaggttatcatactgcgacaaggggaagtagtggaacaaggaccgtgcgcgcgcgtgtttgccacaccgcagcaggagtatacgcgtcagctactggcgttgagctgacgcttaaaaaggattgtagttactaaagggttcggcaattgccacaccaaaatttttcaatcggcatgttgcagcaaactcgtcctggcgatttacaaacaggcacggctcaccttcacactccagcacgctacatggaacttcgatgtcgcttaacgcctggcttagtttatacatcacgctccatgcattatcaccatccgggctaagcaatttaagcgccaccaggctgttgtcaccgcacggtccattttgcggaatcggttcaaccttgctacctgcgaaaccagcagaccagcgatagttctgcggcagtcgatggacgatactgagttgtaaactagtcacttattttccccggaagcacattcacttcacaatttgtttacatcaattttaacacatcatcaacaatccgtctttatacagatcgtaaagattgatgcctcgcctgcgtggcctctatggctctgatttaagtaatatctgcgggcgtggtcacgtttgcggggctatatgtacccgtttctgcgatctaactcaacctttttaactacaatgatgtgactttttacataaattgattttacataaaataaacatatatcgggggaatgatagatttgtggttgacatgcatcaacaaaggaagccttttagcttcctcgttgtgcaatagatcaccgttttttcggccgactggcgtacagacagaagagaatggagctggttgcgcagaatgcaatactccaaatcatcggccatgcagagttaaaggtcgcaagagaaagcaatgcgccaacaattgcccctatgccaaaacggaaggttcctgccaggctagatgccgttcccgccatatggggaaactcatcaagaatgaccgccatcgcattggaactcaccatgctcacgcagcccacaaacgccgcaacgccaaccaccaggctccaaaatcccagccccagcagcgcactgatgaccatccacgctgccataataaattgtatccacaacccgctgcggaacatatttaacgcgccaatgcggcggacgaagcggctgttaaagatggtcatcacgaacagaaaaacaatgtttagcgcaaagtaataaccaaagttttccggcgcgacgtggttaatttcaatataaacaaacggtccggcgcttaagaaactgaacatcccggcaaagctgaaaccactggcaagcatgtagctcaggacacgtttatggcggaacagcgccgcaaagttaccaatagtggtacgaatgtgaaatggctgacgacgctccggtggtaaggtttctttaatcaggaagaaaatcattgcgctagccagaatcgccgctaatgccaggatccagaagatgtaatgccagctcagccacaccagcacccagccgccaactatcggtgccatcagcggtgcaatggttgtcaccagcatgacaaagctcatcatccggctgaactcttctttcgggtaaatatcgcgcatcagggcgttaatgaccacgctggccgcagccgcagccagcccgtggaagaaacgcatcacaatcagctgatcgatggtgtttgccaacgcacacgccaccgcggcggcggcaaacaccagcgtaccgccgagcaccaccggcttacgcccgaagctgtctgccatcggcccgtagattaactgccccaacgcaaagcccagaatataagtactgagggtcatctgcgtactgcccgccggtacgccaaactgcgcactaattaccggtagcgcgggcagatacatatcaatgctcagcggcatcaacatggccagcaggccaaggataaaaacaatagcaaagctgctatgctgtcgggtggtcacaacgggctcctgaaagtcattgaaaagttagacgacgctggcaatttcttcttcagttaacggacgatattcaccgggggctaaatcagcatccagcgtaataccgccaatacgttcacgatgcagctcaaccacgtggttacccacggcggcgaacatgcgtttcacctgatgataacgcccttcgctgatggtcagacgaacctgcgttggggtaatcacttccagcaccgcaggcttagtgagatctttttcgttatgcagctgcacgcctttagcaaattgctctgccgtatcgtcagctacaggactttccagtgtcaccagataggtcttctcgcaatgatggcgcggagaagtaatgcggtggctccactgaccatcatcagtcatcagcaccagaccggtggtatcaatatccaaccgccccgccgcatgcagtttccacgctaccggttcatcaagaaaatagagcaccgttgggtgatcagggtcgtccgtggagcaaacatagccctgaggcttattgagcatgaagtaacgtggaccgtgttgctgcgccagcgggttgccatcgtaagcgacatcatgttcaggaagcagtttgaacgctgcattacggacgatttcgccatcgacggtgacacgattgccgcggatttcacgcccggcaatagcacggctaacgccgagttgctgtgcgataaatttatcaagtcgcatgtgtgtgattttgcctgtaaaaacggaggtcgggcattgacccgaaaatctgaactgttgtctgcccagtatagcggtctaataacatccctcaagggaaaaagatccatggcatactattagcagaataatctacctacgcgagaccatgatttttacacttcgcccatatcagcaagaagccgtggatgccacgctcaaccattttcgtcgtcataaaacccctgccgttatcgtgctgcccaccggcgcaggtaaaagcctggtgatagcggaactggcacggctggctcgtggtcgcgtgctggtgctggcacacgttaaagaactggtggcgcaaaaccatgcaaagtatcaggcgctggggctggaagccgatatttttgccgccgggctaaagcgcaaagagagccacggtaaagtggtatttggcagcgtgcagtctgtcgcccgtaatcttgatgcctttcagggtgaatttagcctgttgattgtcgatgaatgtcaccgtattggtgacgatgaagagagccagtatcagcaaatcctcactcacctgacaaaagtgaatccccacttacgcctgctggggctgactgccacgccttttcgattgggcaaaggctggatctaccagtttcattatcacggcatggtacgcggcgatgagaaagcccttttccgtgactgcatttatgagctgccgctgcgttatatgattaaacacggctatctgacgccgccagaacgactggatatgccagtagtgcaatacgatttcagccgcttgcaggcacagagtaacgggctgttcagcgaagccgatctcaaccgtgagctgaaaaaacaacaacgtattaccccgcacatcatcagccagattatggagtttgctgcaacgcgcaaaggggtgatgatttttgccgcgacggttgaacacgcaaaagagattgtgggattactgcctgccgaagatgcagcactgattactggcgacacccccggcgctgagcgcgatgtgttaattgaaaattttaaagcccagcgttttcgctatctggtcaacgtcgcggtactgaccaccggatttgacgccccgcacgtcgatcttatcgccattctgcgccctaccgaaagtgtgagtctttaccaacaaattgtcgggcgcggtctgcgtctcgctccgggcaagactgattgcttaattcttgattatgcgggtaatcctcacgatctctacgcgccggaagttggtacaccaaaaggcaaaagtgacaacgttccggtacaggttttctgccctgcctgcggttttgccaacaccttttgggggaaaacgaccgccgacgggacattgattgaacactttggtcgtcgctgtcagggatggtttgaagatgacgacggtcatcgcgaacaatgtgacttccgtttccgttttaaaaattgcccgcaatgtaacgcggaaaacgatattgccgcccgccgctgccgcgaatgtgacaccgtactggttgatccggacgatatgttaaaagcggcgctacgactgaaagacgcgctggtattacgctgtagcggcatgtctttgcaacatgggcacgacgagaaaggcgaatggttgaaaatcacctattacgatgaagacggcgcggatgtgagtgagcgtttccgtctgcaaacacctgcccagcgtaccgccttcgagcagctttttatccgcccgcatacgcgcacaccgggcatcccgctgcgctggatcaccgccgccgatatcctcgcccagcaagccttattgcgacacccggattttgtcgtcgcccgcatgaaaggccagtactggcaggtgcgtgaaaaagtgttcgattacgaaggtcgttttcgtctggcgcacgaattacgcggttaatggtagttttgattgatgtataaggcgattgagtatagaatctcgcccgcttttgcatacgcaaagcagatcacttacctgttgctgggtcgcctgtagcaggattaatttaagagagaaagaaatgtttactatcaacgcagaagtacgtaaagagcagggtaagggtgcgagccgccgcctgcgtgccgctaacaagttcccggcaatcatctacggtggcaaagaagcgccgctggctatcgagctggatcacgacaaagtcatgaacatgcaagctaaagctgaattctacagcgaagttctgaccatcgttgttgacggtaaagaaatcaaagttaaagctcaggacgtacagcgtcacccgtacaaaccgaagctgcagcacatcgacttcgttcgcgcttaattgctgaataagttgtaaaaaaccccgctccggcggggttttttgtatctgcagattatgcctgattacggtattgctattttttgcaggccagataaggcgttcacgccgcatctggcattcagaacacaaaaccgattaattgccgccagacgtccggcgctgcaattggtcgcgcaaattcggcggcgtgcctttaatggtcaaggtatcggttgctggatcccagaagatgcgttcacctaacagcatcgcatcaaagttaatagtcaagccaccgccgctaccggcaaacttcgtcaactgacgcagtgtgctacggtctgccgggaagctctcttccagttcgtagcctttttcagccgcaaactccgtgaagctcacttcgcttacgcctgccagctctttgctcaggcttttcagttcgatctcttcgcctgcctgcagctgctcattacagtagctataaacctgctggcgcacgttctgtcgctctgctttatccagttgtgcttcggcagtgaaatcatcaaccgcttgcaacagcccacggttttgcgctttcgcgtttaacccttcgctggccccgaggaaatccataaagaaatccgccactttgcgccctactcgccctttcaggaaagtgagatagcgggtggactctggattggtttcccattcggttaaatcgatacgcgcaacaatatccgcatgattgatatcaagataatgggttgggttgatgtcgagattttcgttaacgcgcatactgctcaggttgctcagaactgccaccagcaaatactccaccgccagatagcgatagtggcaaaacagcacgaatccaccgtcagcaaaaggatatttcgctaattcgtcacgcaggcggccggttgccgcgcggctaaatgccaggaagtcctcttcgccctgacgctgtaagcgcagcgtctgcgccagttcactctcttcgctaaacaagccgtaagctttatttttggcgctatagacccgatgcagttctgccaccatctcaacgacggtttctgtcggttccagcaaactatcgcgcaacaccagctcaaggttctgctcatcacgcttgataagctggtgcagagcaatctggttgatatccagactcatgataaactctcctttaagaccgggcggtattcaaccaccgccggttaagcgacgcaataaaagatggcggtcattttacagaaggcagcgtaacgagaatgatttaacgcataaaaaagcagaaaaaaaaccgttgctacggtaatatgttgccctttcatcaactaactgatttcgatttatgccacaaatttcccgctacagtgatgaacaggttgaacaattgctcgcagagctgctcaacgtactggaaaaacataaggctccgaccgacctttccctgatggtgttaggcaacatggtcactaaccttatcaacaccagcattgccccggcccaacgccaggcaattgccaactcttttgcccgcgccttacagtcctctatcaacgaagacaaagcgcactaagggaaacagataacaggttatggtaactcatcgtcagcgctaccgtgaaaaagtctcccagatggtcagttgggggcactggtttgcactgttcaatattctgcttagcctcgtcattggcagccgttacctgtttatcgccgactggccgacaacgcttgctggtcgcatttattcctacgtaagcattatcggccatttcagcttcctggtgttcgccacctacttgctgatcctcttcccgctgacctttatcgtcggctcccagaggctgatgaggtttttgtccgtcattctggcaacggcgggaatgacgctattactgatcgatagcgaagtctttactcgtttccatctccatcttaatcccatcgtctggcaactggttatcaacccagacgaaaatgagatggcgcgcgactggcagctgatgttcatcagcgtgccggttattttattgcttgaactggtgtttgcgacgtggagctggcaaaagctgcgcagcctgacgcgtcgtcgacgcttcgcgcgcccgctggccgcattcttatttatcgcctttatcgccagccatgtggtgtatatctgggccgatgccaacttctatcgcccgatcaccatgcagcgcgctaacctgccgcttagctacccgatgacggcgcgacgttttcttgagaagcatggtctgcttgatgcgcaggagtatcaacgccgtcttattgagcaaggtaatccagacgccgtttccgttcagtatccgttaagcgaactgcgctatcgcgatatgggcaccgggcagaatgtgctgttgattactgtcgatggcctgaactacagtcgcttcgagaagcagatgcctgcgctggcaggttttgctgagcaaaatattagcttcacgcgccatatgagctccggcaacactacagacaacggcatctttggcctgttctatggcatcagcccgagctatatggacggcattctgagcacccgtacgcctgcggcattaattactgcgcttaatcagcaaggctatcagctggggttattcagtagtgatggctttaccagcccgctgtatcgccaggcattgttgagtgatttcagcatgccgagcgtacgcacccaatccgacgagcagaccgccacgcagtggatcaactggctgggacgctacgcacaagaagataaccgctggttcagctgggtttctttcaatggtactaacattgacgacagcaatcagcaggcatttgcacggaaatatagccgggcggcaggcaatgtcgatgaccagatcaaccgcgtgctcaatgcactgcgtgattctggcaaactggacaatacggtggtgattatcactgccggtcggggtattccactgagcgaagaggaagaaacctttgactggtcccacggtcatctgcaggtgccattagtgattcactggccaggcacgccggcgcagcgtattaatgctctgactgatcataccgatctgatgacgacgctgatgcaacgcctgctacatgtcagcacacctgccagcgaatatagccaaggtcaggatttgttcaaccctcaacgccgtcattactgggttaccgcagcggataacgatacgctggcaattaccaccccgaaaaagacgctggtactgaacaataacggtaaataccgcacttacaacttacgtggtgaaagagtgaaagatgaaaaaccacagttaagtttgttattgcaagtgctgacagacgagaagcgttttatcgctaactgattaattataaatcagttagcgaaatatcttacttgcaatcggtgtggaaaacggtagtattagcagccacgagtcggcacgtagcgcagcctggtagcgcaccgtcatggggtgtcgggggtcggaggttcaaatcctctcgtgccgaccaaaaatcccaagaaaaaaccaacccttacggttggtttttttatatctgcaattaattcgataaacagaccgtgacacatcacagcctgtttattttctgttatcagaacgtcctgagctttcatcctatgaaattaattgctgttaaaagcattgggtacagaaaatacccatagctccatacccggagtcagtttttaaaaactgtttaaagaaatgcacaagtattgtgattgattttttagttgtttttcttgatgagaagctgatgcaaaattccgtctttataatgaaaatgatgccaaagcgaacgacaaggttgtagttttcactacatgtccatacataaaatggggtaacattcacgcgcctggtagcgttaccaacgctacgctcaaacataatgattctaataaaacctcaggagactactatgcctgaagcaacaccttttcaggtgatgattgtggatgatcatccacttatgcgacgcggtgttcgtcagttactggagcttgatcctggctctgaagtggtcgccgaagcgggcgacggcgcgagcgctatcgatctggcgaatagactggatatcgacgtgatcttgctggatctcaatatgaaaggtatgagtggcctggatactctcaatgccttgcgcagggatggcgttaccgcgcaaattattatcctgaccgtatccgatgcctccagcgatgtctttgcgctgatagacgcaggcgcagacggttatctgttgaaagacagcgacccggaagtattgctggaagcgattcgtgccggagcgaaaggcagcaaagtctttagcgaacgcgtcaatcagtacttacgtgaacgtgaaatgtttggcgcggaagaagatcccttcagcgtgctgacggagcgcgagctggatgttctgcacgagctggcacaggggctgagtaataaacagattgccagcgtgttgaatatttccgagcagacagtaaaagtacatattcgcaatctgctgcgtaaactcaatgtccgcagtcgcgtggcggccaccattctgttcctgcaacaacgcggggcacaataaaaatagcccgatggatttatcatcgggctgagatttatgacaaacgcaaaactgcctgatgcgctacgcttatcaggcctacgtggatcgatcaatttattgaatttacacaattttgtaggccggataaggcgttcacgccgcatccggcataaactaagcgcactttgtcaacagtctagcccgatggcatcaccatcgggcctctttttatttactctcctgcgggctcaaatgttgcatcgcctgcgcgatactacgttcaatcaccgcacggcgagtatcgttggcaggtaagagtttcaacatcatctcccacgcggcaacggcttcgccaaatcgctgctgctcaaaggcattaaacgcatacatgcttagcacacggatattgctatggtccgttctcaccagctgacgtagcagttcaccgccgaggcggttgtcgttgggatcagaactacgagtcaacgcttcagcgtatcccagtgcagcatcactgtttttcggatcgaggcgatacgcagtggcgtatgcatcggtggcgatactggcgttacccagcgccatgccaacgcggcccaacataatccagccttctatatctcccggatttttttgcagttgagtacgcatccccagcgcaagacggctcatctcttcttcgttgagcggatcggctttcggatccagcgccctgtccagcaacgccggagcctgtgccgtggcctgctgccagattttcacctgctgataattgccagtctggtagtagctgacgccagccacaattaacgccaccacaatacccggcagataaacaacatatccggcacgcttaccttccggcacgctttgttcaggaaacgcttccggcaccacgcgtacccgacgccggctgcgggcgtatatgacccaaccgccaatgccaatagccactactggcagcacccacagcagcacggtcagcggcgttaacggcggatcgtaagtgacgaagttgccgtaacgcgccaccatataatcgacaatctcttttttacttttaccttcctgcatcagttcatacactttctgacgcaggtcggtggcaatcatgctgttggaatcggcaatgctgttgttctggcatttcgggcagcgcagttcttcagtgagctgacggaactgttgttcctgtgcttcatctttaaactgcaacacatcgatggtcgccagcgcactgccggagatcatcagcatcagcacgcccaataaaaacctcattgtgcggcctccttactgtatttctcccacagcggcttgatctcttcttcccagacgcgaggattcagatcgcccgcatggcgatagcgaatgatgccgttgccgtcaataagaaacgtttctggcgcgccatagacaccgagatccagccctaacatgccatcgccatcaaacaggcttagcgcgtaaggattgcccagctctttcagccagctgattgccttctggcgatcgtctttatagttcatgccgaccacgcggatgccctgcgcagaaagctgattcagatattgatgttccgcacggcaggtcggacaccaggtcgcccagacgttaagcagtactggtttgccctgagtcagcacatccgcctgataaaactgccccggattgtccagactttcgagacgaaacttcggcacaggcttgccaatgagcgcgctttccagattggtcggatcatccccttcggcattacgcgccagctgccacagcagcgccgcggcaatcgccaggaagataatcaacggaattaacaatactttgcgcttcatacggcctccggcgcagttttttgcggactcacgcgcttacgatagcgaggatcaaacagacacagcagtccgcccaacgccatcatcagcccgcccgcccaaatccagcgaacaaatggtttgtagtaaagacgcacggcccacgcgccgttttccagctcttcaccgagggccgcgtacaggtcacgcgtgatgccgccgtcaattgccgcttcggtcatcatgctcccggcagtgttgtaataacgtttttccgcatacagcaccgtttccggcttgccatcgcgcgttacgccgatagtcgccacaccgccacgccagttcgggccagtcacctctttgacatcacggaaggtgaagcgatattcatgaatatcgacgctatcgccggacttcatgcgcacatcacgctcaacgctatagttctggctaaaggcaatgccaacaattgtcactgccagcccaaggtgagccgccaccatcccccaataactgaaggtggttttcgtgccgcgactaatacgtagcgcagcttccgcaattgccagcaccgcaatccagcaggccattgccaggccgagcaccgtcatcgccacaactttgctttcgaacagccacggcaacagcaggctcagcaccagcgtagagatgaaggcgataatcaataaattgcggatcttacgcgggcgatcccgcccccagcgcaccagaggaccgacaccaagcagtagcgcaaacggcaccatcagccaggtaaacatggtgttgaagaacggttcgccaatgctaatactgcccagtcccagttgcttatgcaccaacggcagcagcgtccccagcaacaccaccagcatcgcagcgaccagcaaaacattgttcgctaacagcaaagattcccggctccacagcgcattgtttacgcgactgcgaactttgtgtccacgcgcggcaaacagcagcaggctaccgccaatcaccagcaccataaaggcgaggataaacataccgcgcgccggatcagacgcaaacgcgtgtacgcttaccagcacgccggaacgcacgaggaaagtccccaacagacacaagctgaaggcactgattgccagcagtaatgtccacgctttgaagctggcgcgttgttcagtgaccgccagactgtgcatcagcgcagtccccaccagccacggcataaagctggcgttttctaccggatcccagaaccaccagccaccccagccgagttcgtaataggcccatgcggaaccgagcacgatgccgagcgtcaggaagatccacgctgccagcgtccacggacgagtaaaacgcgcataagtgctgtccagacgcccgctcagcaaagaagcaatggcaaaagcaaacgccacgctgaaacccacgtaccccatataaagcagaggcggatggaagatcagccccggatcctgcaatagcgggttaagatcgcgaccttcaatcgggaagttcggcaacgtgcgagagaacgggttagaggtaaagagaatgaacagcaaaaagccgacactgaccatccccattatcgccagtacacgggccacaatatccagcggaatacgctgactaaaaatcgccaccgcaaaggtccagccgctcatcagcagcacccacagcagtaggctgccttcatgcgcgccccaggtagccgccacgcgataccacaccggaagctgggtattggagttgctggcaacataggtgacggtgaagtcgttgaccacgaaagcattgaccagcaccagaaatgcgccagccacagacataaacagcagccaggcaaacaagcgggaagacgccatcatgcgcgcatctccgcgcgccacgccccatagcggatacacggacagcagcagcgcaattcccagcgccaggcacagcagtccgttaccaatttctggcatcatgatgctgggtccttataaacttacgtcaacttgctgggtccttataaacactcgccgggcgacggtggttagcttccatcgctttctcaacttctggcggcgtatagttttcatcgtgtttcgccagcacttctttcgcgaggatatgattgcctttttccagttcgccctgcaccacaacgccctgcccttcacggaacagatccggcaaaatgccttcgtaagagacatccacactgccttcagcatcgtaaatggtgaaggtcactttcaggctattgggatcgcgctgcacactacccggcatcaccatcccgccaacgcgcagacgctgaccgacttccggcatttgctgagtttcacgcttgccgtagagaatttcccccggcgtataaaagagatcgatattgctgcgcagcgcatatagcaccagaccgatagtcagcgccagccctgccaacacggcacaggcaatccacaagcggtttttacggcgaatattcatgcagcctcctgctgttgcgcagcacgtaaacgcgcctcacgcgcccgctgttgcgccacgccacgcagaattgcgcgatgttgcatcacgctgtgcacgaccaaaaccaccagcggaataacggtcatcaccaccgccagccagacaaaaaaggcgtaaccgcccattgcgaaaaattcattccaggaagcaaatgcaggggtcatttacggcctcttttcagtatcagttcactcacccacggacggcgtttttccatcagcaaaatcaaattacgcatccgcatcagcgtcagcgtggcagacaggagcaggaagccaaaaatgctccagcgcagcgggctacgcatcgccggatcgatactttgctgcatccgcgtacttccctgatgcagggtgttccaccactccacggagtaatgaataatcggcagattcaccacgccaatcagcaccaggatacctgccgcacggcccgccagacggcggtcgtcgaaggcgtgccacagggcaatcacacccacatacaaaaacagcagcaccagttcagaagtcagacgtgcatcccatacccaccaggtgccccacatcggttttccccatgcagagccggtaaccagggcaataaaggtaaacacggcaccaatgggggccatcgccgccaccgccaggttggccattttcatctgccagacaaggccaataaacgctgccactgccatacttgcataaatgcccatgctccagatcgccgcaggcacatgcaggtagataatgcggtagctatttccctgctgataatcagccggagcaaagccgaatccccagatccagccgacggtaagcacgaccacactggcaattgccagccacggtataaaccagccacagatttgatacagccgtggtgggatcgccagttgatgcagtgttttccacatagtttcgataccagactcgaacaaaaatcagtaatccagcgttattgaatgctgattcgtaacgctgccgccgtcgcaaaaggacttaatgtcgcggtgcctgccagcaacgcgcctaaaattgccagatacccgtcaacgggcaaatgcatagaagccgcgtccatcgcggcggtggcaaagatgagtaatgggatagtcagcggtaacaccagtatgctgagcagcacaccaccgcgcttaagtcccactgtcagcgccacgcccggtgcaccgagaaagccaagcgtaggcgttcccagcagcagcgtcagcgccatcacttgccagccataaacatccattcccagtagcattgctaccagtgggctaaggatgagtaacggcagaccggttaccatccagtgcgccatcaccttcgccagcacaacggcgggcaagggtaacggcaacaacatcaattgttcaagactgccgtcctgcaaatcgtcacggaacagtcgttccagcgccagcaaggaactaagcagcgcagcaacccagataatgcccggtgcaatacgcgccagcagttgcggctccggaccgatactgagcggaaaaagggtaattacaatcaggaagaaccacagcgggttggcgatttcggcgctatggcgaaacgctacacgcagctcaagacggaaaatgcgccagaacatcatgcggccctcgtttgcgtcagactaatgcggcgaattttactttcagcaacgttgagcggctggtgggtagtcagaatcacaatccccccctgctccgtatgctgcgccatacgctgggtcagacgatcgacaccgttaacgtcaatcgcggtaaaaggctcgtcgaggatccataacgtggcacgggtcagccacagacgcgctaaagcgacgcggcgttgttgcccggcgctgagctgatttacaggaatatcttcgaatccggcaagcccggcctgcgccagggcttccagacattgtgcggtatcgccatcgcgatgataaaagtgcagattttctaacgccgtcagccgggttttgatccccggctgatggcctatccataacaggttttgatggtagctgtcgcgtacctgatgcaagggctgcccttgccagagaacctcgcctgcgtcagggcgagacaaccccgtcagcaaacggagaagcgttgtcttccccgcgccgttgctaccggtgatttgtacccactctcctgcgttcagcgtaaaactcaagccactaaataaggttcgttcatcccgctcacaaagtaactctctggcttcaagcatacccacgcaataaccctgttaaaaacctggctcgacttcacgcatatcgggcagcttgtgcgctatccctttatggcaatcaatacaggtttgcccatctttcaccgcctggtcatgcatcttcgcggcaacgcttttctgggcggttgtatccatatactcgaagttgtgacagttacggcactcctggctgttattgtccttcatgcgccgccactcattctgtgccatcgtcagacgatgagcttcaaatttctgcggcgtgtcaataacgccaaaaattttaccatacagctctttacttgctttgagcttgcgtatcatcttcggcacaaactcgtgcggaacgtgacaatccggacaggtcgcacggacgccgctacggttgttgtagtgcacggaatccatgtattcctgatacaccgtgttgcgcatttcgtggcagctaatgcagaactcttcggtattggctttttccatcccggtgttaaagccaccccagaagacgatgccgccaacaaaaccgatcaacagcagcgtccccagcgccagacggctgggggtacgccaccatttccacaggcgcttaatcagaccaggcttacggtcagaatttcccataataacctcttatttcccgtaacctttacttggggtaaaggtattccccacgattggcgcggtatcggcctgcggtacgtgacattgcagacagaaataacgacgcggagccacttccgcgcccactttgccgtcgctgtccataaagtgagtaggactgatacgcggcgcgccagtggtgcgatagctttcgacaccgtggcactgcaagcagcgattggtattggtcgttacctgataaccttcaacgctatgcgggatcattggcggctgattcacatagttcagcggcatccgatcctgctcttttggcatccgaatggccccttcctgtgtcccggatacttccgggctctggctaaaatcgacgccattagccgcccaaaccgcgccgcttaccaccagggccagcatcgccgtccattgacacagcgctttcttcaggtcatggcttttcatgatttcgctcccgaactccattatgtcaacttttcgctccgctactccatcgtgtagttattgtaaatacatcctcagaacagacatccacgcagcgaccgcacgtcatgcaatcgcggctggtgacctgcaccgggctttgttcatccagcaccggggcacgtagcacatgcggttccgggcaaacatgaaaacaatccatacagcggttacatttctgccgatcggtggccgcaacggtaatcacacctttgctacccagcacgccatacagcgcgccaaccggacaaatgtgcccgcaccagccgtgttcaacgaccagtagatcaaataaaaacagcgcgagaataagcagcgcgccgctgccgaagcccattaccaggctacgccccatcagagaaacggggttgatccattcccaaatgagcgtgccagttaaggcacttcccaccagaatgaccaccaacagcacgtagcgaatgtggcgagggatcgtcgcagactgattgaggtcaaagcgcctgcgtaaccagttcgctaagtcggtaatcgggttcagcgggcagacccagctgcaaaataatcgctttcccgccagggcgtagagcacggtgataatcaccgcaccggtcaacgccaccgtggcaggcagatgaccactggcaagactttgcagcgtcatcagcggatcggtcagcggaacggtgtcgaataacaggctactgctgtagttgccgtgcaagatccacacaccaaaccatggaccgctcaaaaacatccccagcacgaagaactgacaaaggcgacgtaacaccagccaacggtgactgcgccaccagccttttttctccagcgcctcgcgcccggcgtcacgtttacgatttgccattgttcccctccagccagccgttacttagcttttgccattgttcccctccagccagccgaagcggtaatggtgacctaactcccctttcgccagactcagcggtaacaccttgattgccggttgttccagcacgcatactttttcgcacttaccgcaaccggtacaggcgtcgctgtgaaccgtcggcagaaagcgggcgtgcttaccggtacgcgtgttgcgctccagctccagggtgatggcctcatcaattttcgggcattcgcgataacaaacatcgcagcgcagcccctgaaagttgagacagttttcctggtccaccagtaccgccagccccatccgcgcgtcgtcgatgctttcaatctcacgatccagcgcaccgcttgggcacactttggcgcacggaatgtcctcacacatttcgcaaggaatatcccgtgcgacaaaatatggcgtgcccgcgctcagaccagaggccagcgtcgccagttttaaggtgtcgtaagggcaagcctgaacacactgaccgcaacgcacacaggcactggcaaaggcgttctcgtttatggctccgggcgggcgcaaccgcacgccagatgcgcgtgcggtttgctgttgtaaccccagcgccacacccacggcagccagcccgcctgctgtgcgaacgacatcgcgcagaaagcggcggcgaccattttgaggtttcgcactccgggacataatggcttacaccttctccagtttgaccgcgcacttcttgaagtccgtctctttgctgagcggatcggtcgcatccagcgtcagtttgttaaccaactgtgcggcgtcgaagaacggcatgtacaccaggccctgtggcggacggttacgaccgcgcgtttcaacaatgctgatcacttcgccacggcgagaaaccactttcactttgtcgccacggcgcagatcgcgcgctttcgcatccagcgggtgaataaacaggaccgcttccgggaaggcgcggtgcagttctggtacacggcgagtcatactgccggtgtgccagtgctccagaacgcgtccggtagagagccacaggtcgtactcttcatccggtgcttccgccgccggttcgaatggcagtgcgaagatcaccgctttgccatccggtttaccgtagaacttatagccttcgcccgctttcacgtacgggtcgttaccttcgctgtaacgccactgcgtttctttaccgttcaccaccggccagcgcagaccgcgcgctttgtggtagtcatcgaacggtgccagatcgtgaccgtgaccgcgaccaaaccatgcgtactcttcgaacagccctttttgcagatagaagcccagctcgcgggattcatcgttcagctgatcttccgccagttcggataccgggaatttgctcacttccggtgtggcatacagcacttcgtacagcgttttgccacgcagttccggtttcttcgccagcagatcttccggccatacttcttcagttttgaagcggcgggagaactggactaactgccagagatcgcttttcgcttcgcccggtgcctgtacctgttgacgccagaactgagtacggcgttcggcgttaccgtaagcgccctctttctctacccacattgcggtcggcaggatcaagtcggcggccagcgcactgactgtcggatacggatcggagacgatgatgaagttgcgcggatcgcgccagcccggcatacgctcttcattgatgttcggcccggcctgcatgttgttggtacacatggtccagtaaacattcagtttgccgtctttcagcgcacggtcttgtgccaccgcgtgcagaccgattttcgccggaatggtgccgctcgggatattccacttcttctcgcagatatcacggtgtttctcgttggtcaccaccatgtccgcaggcagacggtgagcaaaggtgcccacttcacgcgcagtaccacacgcagaaggttgcccggtcagggagaacggaccgcaacccggctgggaaattttgccggtcagcaggtgcaggttgtagaccaggttgttagcccacacgccacgagtatgctggttgaagcccatcgtccagtaggagatgactttcttgttcggatcggcatacagctgcgccagttgttctaactggtctttcggcacgccggtcatttcggcagttttttccagcgtatactcggcaacgaaggctttgtaatcttcaaagctcatcggttcggaggcgtcagaacccggattcttcgctgctttttccagcggatgggtcggacgtaaaccgtagccgatgtccgtcgcccctttgcgcaggttaacgtgcttgctgaagaagtcctgatttatcgcattgttttgaatgatatagttggcgatgtagttcaggatcaccaggtcagattgcggcgtaaagatgatgccgttatccgccagctcgaagctacgatgctggtaggtagaaagcaccgccacggtgacgttctggttagagagacgacggttagtgatgcggctccagaggatcgggtgcatttccgccatgtttgcgccccacagcacaaacgcgtcagcctgctcgatgtcgtcatagcagcccatcggctcatccataccaaaggtacgcataaagccaactactgcgctcgccatacagtgacgcgcgttcgggtcgatgttgttgctacggaagcccgctttaaacagcttggacgcggcataaccttcccagatagtccactgaccagaaccgaacataccgatgctttccggccctttttctttcagggcggttttgaatttctcttccatcacatcgaaggcctgatcccaggtgattggggtaaattcgccttctttgtcatatttaccgtttttcatacgcagcagcggctgcgtcaaacggtctttaccgtacatgattttgggcaggaaatagcccttaatgcagttcaggccacggttaaccggtgcgtccgggtcgccctgacaggccaccacacgtccctgctgcgttccgaccagaacgccgcaaccagtaccgcagaaacggcacggcgctttatcccatttgatggcttcctgctgaccaacaacggcgcgggcaacgcccggcacgctgagaccggcagccgccgcagcggccgcaacggcgttagctttcataaagctacgacgactgagtttcatggtgtttcctcaccttgctcttcctgctggtgataaaccaggctcaccgccagcacgccctctacgttgcgtacactctcaatggtttggatcagcgtttcgctgtcttctgcttccaccaccacaatcaactgaccgctcggcgcgtcgctgacagcaacttcacagccgggaaaggcgttcagttgggtgctgatgtcactaattcgttcgcttttggcctgcacgaccaggctgcaaacttgccagttagtgtgcatggagatactccgcagttatggcacttaccggacagctggctgcacatgctccacatccgttgcaaagttggctattaagttgcggctggtagatcccggagagcgtcgggcgaaagataattgccattggctcacagctatcctgacagcggcggcattcaacactctgatacgccaggcacgcgtccccgatggtgaactgcaaatcccaggccctggtgtggcgcggagaaaataggctttcggggcaagcctgcgcgcaggcgtaacagaagctgcactcgttatttttgaaattaacgctcggatagccgcccgcgccgcgttgcagaatgttgttttcacaagcattaatacaggcgtcgcagcgggtgcaatgggtcagaaaatgagattcatcaccggaccagggcggacggataccgttactggctttgcgccagcgaccagtgagtatgccccgacgggatgcatcaatcttcacattgaccttccatcattaacgcgctctgaaaattgagagcgaccaaataaaccgcataattaataagccatttttatagccgctaagatattaaaggatgtgtcaaagatgcataccccgatcggggtaaaacctgtagcaggatcaaaagagtggcgggaagcgtggcaaaaacgggcttttgctcacatttcaaatggttataaatatatttatatagcgattgattcaccagagatatttctgctggtttgctctctcattagaatttaacactaaaagagcaggtaaaattgtctgaatgttctttaagttattcataaagcaaattaataaatctgatgaatatgttaaccttcagcgacatcatcggtgaaaacctataaatgaagaaggaaagcaaaaaaatgaagaccattctacctgcagtattgtttgccgctttcgctaccacttccgcctgggcggcagaaagcgtccagccactggaaaaaatcgcgccttatccacaagctgaaaaagggatgaagcgtcaggtgattcagttaaccccgcaagaagatgaatctaccctgaaagtagaactgttaatcggtcagacgctggaagtcgattgcaatttgcatcgtctcggcgggaagctggaaaacaaaacgctggaaggctggggctatgattattatgtctttgataaagtcagttccccggttagtacgatgatggcctgcccggatggcaagaaagagaagaaatttgtcaccgcgtatctgggcgatgctggaatgctgcgttacaacagcaagctgccgatcgtggtgtatacgccagacaatgtagatgtgaagtaccgcgtctggaaggcggaagagaaaattgacaacgcggtagttcgctaaactgccgtgaagtgcggcaccccgtaggtcagacaaggcggtcacgccgcatccgacatccaacgcccgagccggttgcctgatgcgacgctggcgcgtcttatcaggcctacaccgctgtgaagtgcggcaccccgtaggtcagacaaggcggtcacgccgcatccgacatccaacgcccgagccggttgcctgatgcgacgctggcgcgtcttatcaggcctacaccgctgtgaagtgctccaccccgtaggtcggataaggcggttacgccgcatccgacatctaacgcccaagccggttgcctgatgcgacgctggcgcgtcttatcaggcctacaccgctgtgaagtgctccaccccgtaggttggataaggcggttacgccgcatccgacatccaacgtccgagccggttgcctgatgcgacgctggcgcgtcttatcaggcctacaccgctgtgaagtgctccaccccgtaggtcggataaggcggttacgccgcatccgacatctaacgcccaagccggttgcctgatgcgacgctggcgcgtcttatcaggcctacaccgctgtgaagtgctccaccccgtaggttggataaggcggttacgccgcatccaacatctaacgcccgagccggttgcctgatgcgacgctggcgcgtcttatcagcatacgccacatccggcataccatgccggatgtggcgtatcattacaacgcaatatccgccacttctttttgaacgggttgcggtttcaactgcggtttcggcgtactatctgctgcctgcggcttgtcgtagttcaaccccagcacttcgctggtgtactgcaactcgcgttctgttgccgctacatcaccgttcagcttgcgtccataagacggaacgatcgctttcaacgtagcctgccattgcgggctggaaacacgatcgccaaatactttttccagcagattcaacataatcggcgcggcggtactcgcccctgggcttgcccccaggagcgcggcaatggttccttgctggtcactgacgacttcagtacccagacgcagtacgccacctttctcggcatcacgcttgataatctgcacgcgctgccccgcttgccacaaacgccagtcctcttttttcgcctgcggatagtactctttcaacgcttcaaaacgatcctcttcactcaacatcacctgactcaccagatatttcaccagatcgaaattatccagcccgacgtgcatcatcggcatcacgttagaggtggtggtggaactcattagatcccacaaactaccgtttttgaggaatttggtactgaaggtggcaaatggcccaaacagcactacgcgtttaccgtccagaacgcgggtatcgatatgcggaacgctcatcggtggtgcgccaacggatgctttaccgtaaaccttcgccagatggtgattaaccacgtccgggttttcgctaacaaggaactgtccgcccaccgggaaaccggcgtagtctttcgcttccggaatcccgctttcctgtaacagcttcagcgccgcaccgcccgcgccgataaagacaaatttggcacgaatgttctgtgcagtgccatttttcagatcggcaacggtaacggtccaggtgttatcgtcattacgctttagggcgcggacttcgctgctgagttgcaggctgaagttagatttcttctgcaaggaagcaattaactggcgggtgatctcgccgtagttcacatcggtaccaatttccgtacgcgtggctgccactttctgttgcggatcgcgcccttccatcactaacggtgcccactctttgatctgcgcgtgatcttcagagtaacgcataccgcgaaacaggctgctttgttgcaacgcggcgtaacgggcgcgcaggaaattgacgttatcctcgccccagacaaagctcatatgcggaacggtattgataaaactacgcggagtacgcagcacgccgcgctcaacctggtgcgcccagaactggcgggaaatctgaaatgcttcgttaatggcgactgctttttcaatactgatgctgccatcggcgttttgcggggtgtagttcagttccatcagtgcagaatgcccggttccggcgttattccagccgttgctactctcctgcgcgacaccctccaggcgctccaccatggtcatgctccattcaggctccagctcgcgtaaataggtccccaacgtggcgctcataatgccgccgccaatcaacagtacatcagtttcctgctcctcggacgctttcgcttttgccgccatgctaacggcattaagccccacggccatgctgaagagcatggcagtcacttttttcatcttgttaatgccttacttttagtcgctttattgcaggtgagatttgcgcggcatcaacggtaacacttaagtaacaacatttaaataatgtttataaattatattctaattttagaaacattataatttcgttgattaattatagggttattagaaatgaagggatttttagcatattgacctgacggcagcagtccgccaggtcagcgtcgtaatattatgccgtccgggcaacggcatcacggctagcggcatcgcgctcttcgcccgtcagctcgctaagttgcccattgcgcatttccagcaggcggtcggcgtggataaagtaatgatcatcatgactgatagcgaaaatagttttacccatctcctgcatcagcggcagcaacacctgataaaactcacgacggaagtgtggatcctgatccgccgcccattcatccagcaggataatatcgcgttcttctgccagcgccagcaacagcgccacgcgttttttctgccctttacttaacttcaggttaacaatacgcccgttgcttaactcaagcttatgagccattttcagctgcgccagccacttctcaaccagttgcgggttagcgggtttaccctccggccccagcagttgatcaaacagccagacatcggtaaacactgcgctaaacagtttgcgataatcttccggttgttcgccgctgacaggtttgccatccagcaagatttcgccgctttgtggctgatacaagcccgtcaacaacatcgccagcgtgctttttccgctaccgttgccgccaatcagaaacagcagctcgccacgtttgatggtgagattaatcggaccaacggaaaacgcgttatcctgataagcaaacgtcacgttacgcagctccagcgtttgccagttgggaaacgcctgcgggcgcggaaactctgctttgaaaggcgcgagcgcgaatttgttcagcttgttaaacgccacctgcgccgtcagcagcgtcggcaatgcgccaaccgcgctaagcagcggcgtacgcaggaataaaagcgtcaagctataggtcgcggcaacgttggtatcagcccaaccgaggctgttcgccatccagaacaccaggccgattgcgcccagcatcatgatgttactccagttcacggcactaagatggaaggtgtctgcgcgaataatatggtggcgatactcttgcgcatcaggaatgtagaggttgttaaacacatactcggcgcgttcccggttcagagtcagctctttgcgcccttcaagtacagtttgaaaatccgtgtacagcttgtcttcggtttcacgcagggtcgccatatgtttgtacacccgcgccaccagcacaaaaccgccccagatggtgatcgccatccagatagccgttaccagcaacattttgccgctcagcatccacagatacgccgcactaccgatagtgagaatgatcccctgcaccagttccggcagacgcacaaaagcaatggtgatattgcgcacatcgctggttaaccccgccagcaagctggcgctaccgagttgttcaatgcgctcgacgtgagtatccagaatccgcttgataaattcactacgcagtcggtaaacgaagtgatgccccaaagtggtgagcgccagttggcttccgagagtgactgccatcaacagcagcaataatcccagaaactccggcaacaccagcagactggtatccgccgtttcgataaggcgctgattgataaaagcaattaagccaatgcctaatgccgcactggcgaggcttagcgccatcacactgataaatggccagcgatactgccgccagacaagtacaagaagttccatgcagaaaacccggacaatgaattacagcccgcagtttaaacatcttcgcgcgcacagcaataataattcttatttttattcttttttacctgcctgacggaatgtcaggttgtagcggcagtcgatggtgagtggatgaaaccccgctttcaacggttgaataccgtgataaaacagccggctttcaccgccccataccaccacatcgccatgttccaacaacaaacgtttgagcggatcatttcgtttcaggccgccaaattgaaaaatcgcgggtaagcccagagaaacagaaacaattggcgcgcgcagatccggttcgtctttatcctgatgcaggctcagtttcgcgccaggagcgtagcggttgataagacaagcatctggctggaaatctggatagcccgccgccgtagccgcacgttgacataaattatgaaaactctgtggcatggcgggccacggtttatttgtttgcggatcaatggggctatagagataaccttgccgatgggtcgtccagcccagatgcccacagttggtcatcgccacgctcatggtatatcccccgggggtgaccatctggcgaaacgggctctggctggcaacgtcattaatatcgcggatcagttgctccgcagcgttaaaagcaaaacgccgtaaaattaccgcaccagccgccagtggctcttgccacggttcagcatcggcaaacagatccaacattacctctcctcattttcagcttcgcggcgcagcagttgcgctttacggctcacgccccagcggtaaccggaaagtgtgccatcaccacggaccacccgatgacagggtattatgatagccagcttgttggcggcacaggcgctggcaacggcccgtaccgctttcggtttgccgatggcgttagccagttgctgataactgacggtttcaccgcaaggtatcgtgcgcagtgcctgccagacttgttgctgaaaagcagtgccgcgaatgtccagcggtaacgtcagcggcgtatcgcgttgattgaggctggcgatcacttcacgcacatgttgctgaaacatcagatcggcaggcgcgttgtcggcagcgggaaacatctgctgcaactcgctgattagtgtcgcgtcatcatcgcccagcaatatcgcgcaaatcccccgctcgctttctgccaccaggcaacgacccagctcacaatcagccagcgcgtaacgcaccgccagattttcgccaccgtgacggaattgtttagccgtcatgcccagcgtttcgtcagctttgcgatagtaactgctgctgtcggggaatccggcgttaagaatagacgtcgtcacgctctcccctttcgccaggctttcgcgcaaacggcgagcgcgccaggcctgttgccaggctttaggcgtcattccggtagtcgctttaaacaaccgatgtagatgaaatggactcatcgccacctggtcggctaaggcttccagcgttacaggcgtttcctgttccagcagtcgacacgcgtgggtgattttatccaaccgatgttgctgggcattggctttttctggctgacaacgtttgcaggggcgaaagccagcggcgagtgcctcgctggcatttgcgtagaaggagacgttttcccgcaaagcatgtctggcgcggcaagacggacggcaaaagatgcctgtggtacgcacggcgaaaacgaattcgccgtcggcattcgggtcgcgggctaagacagattgccagcgttgatcgtcagttaagcatgtggcttttttcataatcagctccctggttaaggatagcctttaggctgcccggtcaccatcacgcaaaaaccaacaatcttgcgctttaatttttttcgctgacaaggaagcttttaaactgtggactcatccaggttttaaagctatcgccttctttggtgatcatataaaccgccagcccttcccggcgaacaacctctttagctttctccggcccgagtaccatcaagccagtatcccaggcatcggcttccagcgccgtcggagcaatcaccgtcacggataccagattgtgttcgatgggacgcccggtttgcggatcgataacatgggaaagacgtttgccgtccagttcgtaatagttacggtagctgccagaggtgctaatcccatgaccgttgatatccaccacagcctgaaccgcgttttctttatcggttggtttttgaatcgctacccgccacggcaggccttcaccgttcataccacggctgttcagcgcgccgcccacgctcaccagatagcgggaaatcccttcctgctccatcaagcgtgccaaatgatcggccgcatagccttcgccgacggtggagagatcgacatataaatccggcaggtctttttgcagatattgctgatggctctgattgatgaccgtcaggtgctgtaagccggttttggctttcatcgcatcgatctgttcctggctcggaatttgaaccggctgttgttccgggccaaagccccacagattcaccagcggcccgacggttatatccatcgcgccatcggtcttcgcgccaatgcgcaggctggtggtgacgatatcggccatcgcttcacttaccggccacgggcttaaactttggctgtcgttaaagcgcatcagcgcggaatcttttttataggtgctaagcagctgatcgtcggcgtccagttgggtctgaatcttttctttaagttcggcgctgcgtttggcgtcaatgcccgggatgctggcacgccagaaggtacccatagttttgccttcaagaacggtaacttcagtagcgtgggttttggcgggttgtggtttttgatcgcaaccaacaaagaagagcgcggcagccagcagtgccacgcgggtaaagcttatttccatacgtgattatcctcatgcgaacggtcgcaagagtacaccaaaaaactgagtttgtacgctgaaaacaatgaaaaaagggcccgcaggccctttgttcgatatcaatcgagattagaactggtaaaccagacccagagctacgatgttatcagtgttgatgccagcgtcacgagtgaactggttgtcgtccagcaggttgattttgtagtcaacgtaggtggacatgtttttgttgaagtagtaggtagcaccaacatcaacatatttcaggatatcttcgtcgtcgtagccacgacccaggtttttacctttagactgcaggtaagccagggacggacgcagaccgaagtcgaactggtactgagcaacagcttcgaagttctgtgctttgttcgcccaacccagggaacctacgcgagttgcgttgtaggtctgggtgtactgagcagccaggtagatgttgttagcgtcgtatttcagaccaccagtgtaggtttcagcacggtcgccgttaccgatgtaagcagcggtgttctgagcatcagtacgtttggagctggagatcgcaccaccgataccgaaaccttcgtaatcataagtgatagaaccgccgacgccgtcgccgttttgacgcagtgcgtcacgaccgttgttagttacgccactagtaaagccttcaccagatgggttgccgtttttaccctggtactgaacagcaaagttcaggccgtcaaccagaccgaagaagtcagtgttacggtaggtcgcgaagccgttaccacgctgctgcatgaagttgtcagaaccgtaggtgtcaccaccgaattctggcagtacgtcggtccaggaagttacgtcataaacaacgccgtagttacgaccgtagtcgaaagaacccacatcctggaatttcagacctgcgaatgccacacgggtccaggagttgttttcgttttcagcgctgttgccctggatctgatattcccactggccgtaaccggtcagctggtcagtaacctgagtttcacctttgaagccaagacgcatgtaggtctggtcgccatctacatctttgttgtcagagaaatagtgcaggccgtctactttaccgtacagatctaatttgttgccgtctttgttgtaaacttcagcagcgtttgctgcgcctgctaccagcagagctgggaccaggagggacagtactttaactttcatgttattaaccctctgttatatgcctttatttgcttttttatgccactgcatactgattaaccctcattaatcagtcggcaagtccattctccccaaaaatgcagaataatccaacacgaatatgatactaaaacttttaagatgtttcatttatcgctatagatgtttcaaaatgtaaatgcaagggaactttttaagattattgcggaatggcgaaataagcacctaacatcaagcaataataattcaaggttaaaatcaataacttattcttaagtatttgacagcactgaatgtcaaaacaaaaccttcactcgcaactagaataactcccgctatcatcattaactttatttattaccgtcattcatttctgaatgtctgtttacccctatttcaaccggatgcctcgcattcggttttttttacccttctttacacacttttcattattctgtgctaccacagaaaaactataacgcttgttaactatttcacaaataattaacatccgcataatttccagcaatctttgtttatttgcaattatttttgttgggctttttgtaggttatttgtacagcaaaatggcgcttgtacatctatttcccccaatgcaggatgataaatatcacgggagaatagagaatcatcaatcaggtaagagtctggaatttcacactgtaccctttatactgccctatcacttcgcgaagttttaacaggtcataaacacgaatgcgtcagaaagagacaacggccacgacccgctttagtctcctaccggggagcattacccgcttctttttactgttgatcattgtgttactggtgacgatgggtgtaatggtacaaagcgccgttaacgcctggctgaaagataaaagttaccagattgtcgacattacccatgctatccaaaagcgcgtcgataactggcgttacgtgacctggcagatctacgacaacattgccgcgacgacctccccctcctccggcgaaggtttacaagagacgcgcctgaaacaggatgtctactatctggagaaaccacgccgcaaaacggaagcgttaatctttggctctcacgacaacagtacgcttgagatgactcagcggatgtccacttatctggatacattgtggggcgcagaaaatgtaccgtggagcatgtattacctgaatggtcaggataacagtctggtgctgatcagtaccctaccccttaaagatctcacctccggatttaaagaaagcaccgtcagcgacattgttgatagtcgtcgtgcagagatgttgcaacaggccaacgccctcgatgaacgcgaaagcttttctaacatgcgccgcctggcctggcagaacggtcattactttacattgcgtactacctttaaccagccaggacatctggcaacggtcgtggcttttgatctgccgattaatgatttgatcccaccgggtatgccgctggacagtttccgccttgagccagacgcgacggcaacgggaaacaatgataatgagaaagaagggacggatagcgtcagtatccactttaacagtacgaagattgaaatctccagcgcactcaactctaccgatatgcgcctggtctggcaggttccttatggcaccttattgctggatacgttgcaaaacattctgctgccactgctgctgaacatcggtttgctggcgctggcgttatttggctataccacattccgccatttctccagccgcagtacagaaaacgtccccagcacggcggtcaataacgaattgcgcattttacgggcaatcaatgaagagatagtcagtctgctgccgctcggcctgctggttcacgatcaggaaagcaaccgcactgtcataagtaacaaaattgccgatcatttgctgccgcatttgaatctgcaaaacatcaccaccatggcggaacagcatcaggggattattcaggcgacgatcaataacgagctgtatgagatccgcatgttccgcagccaggtcgcgccgcgcacacaaattttcattattcgcgatcaggatcgcgaagtgctggtaaacaagaaactcaagcaggcgcagcgtctgtatgagaaaaaccagcaggggcggatgatctttatgaaaaacattggcgatgcgctgaaagaacccgcacagtccctggcggagagcgcggctaaactcaacgccccggaaagcaaacaactggcgaatcaggcagatgtgctggtgcggctggttgatgaaatacagttagcgaacatgcttgcggatgatagctggaaaagtgagacggtgctgttctccgtgcaggatttaattgatgaagttgtgcctagtgtgttgcctgccatcaagcgtaaaggtctgcaactgctgattaacaatcatctgaaagcacacgatatgcgccgcggcgatcgcgatgccttacgacgtattttgctgctactgatgcaatatgccgtgaccagtacgcaattgggaaaaatcacccttgaggttgatcaggatgagtcctccgaagaccgcctgacgttccgcattctggacacgggagaaggcgtaagtattcatgaaatggataatttgcacttcccgtttatcaaccagacccaaaacgatcgctatggcaaggcggacccgctggcattctggctgagcgatcaactggcacgtaaactgggcggtcatttaaacatcaaaacgcgggatgggcttggtacacgctactctgtgcatatcaaaatgctcgcagctgacccggaagttgaagaggaagaagagcgtttactggatgatgtctgcgtaatggtggatgttactagcgcagaaattcggaatattgtcactcgccagttagaaaattggggtgcaacctgtatcacacccgatgaaagattaattagtcaagattatgatatctttttaacggataatccgtctaatcttactgcctctggcttgcttttaagcgatgatgagtctggcgtacgggaaattgggcctggtcaattgtgcgtcaacttcaatatgagcaacgctatgcaggaagcggtcttacaattaattgaagtgcaactggcgcaggaagaggtgacagaaagccctctgggcggagatgaaaatgcgcaactccatgccagcggctattatgcgctctttgtagacacagtaccggatgatgttaagaggctgtatactgaagcagcaaccagtgactttgctgcgttagcccaaacggctcatcgtcttaaaggcgtatttgccatgctaaatctggtacccggcaagcagttatgtgaaacgctggaacatctgattcgtgagaaggatgttccaggaatagaaaaatacatcagcgacattgacagttatgtcaagagcttgctgtaacaaggtagcctattacatgaacaatatgaacgtaattattgccgatgaccatccgatagtcttgttcggtattcgcaaaagtcttgagcaaattgagtgggtgaatgttgtcggcgaatttgaagactctacagcactgatcaacaacctgccgaaactggatgcgcatgtgttgattaccgatctctccatgcctggcgataagtacggcgatggcattaccttaatcaagtacatcaagcgccatttcccaagcctgagcatcattgttctgactatgaacaacaacccggcgattcttagtgcggtattggatctggatatcgaagggatcgtgctgaaacaaggtgcaccgaccgatctgccgaaagctctcgccgcgctgcagaaagggaagaaatttaccccggaaagcgtttctcgcctgttggaaaaaatcagtgctggtggttacggtgacaagcgtctcagcccaaaagagagtgaagttctgcgcctgtttgcggaaggcttcctggtgaccgagatcgctaaaaagctgaaccgcagtattaaaaccatcagtagccagaagaaatctgcgatgatgaagctgggtgtcgagaacgatatcgccctgctgaattatctctctagtgtgaccttaagtccggcagataaagactaatcacctgtaggccagataagacgcgttagtgtcttatctggcatttgcaccgattgccggatgcggcgtaaacgccttatccggcctacgattcccattatttcaacaaattacattaaagtaggccagataagacgcgtcagcgtcgcatctggcatttgcactgaatgccggatgcggcgtaaacgccttatccgtcttagctatcccggcttttcctgaccctctcggcatataacgtcagcgtctgttttatcacatccagcgttaccggcttgctcaggcagctgtccataccggactccagacaccgctgcttctcttcagccaacgcattagcagttactccgattaccggcaacgtcagtcccaactgacgaatgcgttgcgtcaagcggtaaccatccatatttggcatgttgacgtcgctaagcacgatatcaatatgattcttgctaagtacattaagcgcatcgacgccatcattcgcggttttacattgatagcccaagcttcccaactgatctgccagcaaacgccggttaatcggatgatcatccacgaccagaatcatcatatcgtcattatcgctgaccgctttgtccgtactcggcagagcgttagcaggatcgtcgctctccatctcgatcaaataaatacgcgccaacaatgccggtagctcatgcggagcagccacactgtgtacccactcccctggcgctttctccagcggaataccaatatggcgacgacagaaggtcactaccgctctgccctgccattttttactcactacctcgtcagtgatcaacacatcttcgggagtcggttcctgcccttcgtatgttgtaacgacgatgccgctgcgctgcaaactggtttccaggaactgacagaggctcgcattgcggaccgccagccagcagcgtttaccactcaacccttccacgccttttttctgcgggtactgagcgccgtacaacggaatacgcacggtaaactggctgcccattcccggttcactatctacgctgatatcgccgtccatcatgctgatcagtttttcacaaatcgccagacccagaccggtcccctggaaattacgctgtacgcccgttccgacctggaagaagggatcaaacaagcgcaccacttctttcgccggtatccccacgccggtatcgcgaacacggatagagagataatcgccatccgcgcgaacatgcaaaactatacagccggtatcggtgaattttatggcgttactcaacaggttggagatgacctgctgtaaacgcatcgggtcgccatttaaggccactggcacatccggttcaataaagcagtacaagcctaactgcttgcgtaccaccagcggtaaatagttggcggtgatgtggttcatcacttcacgcggactaaactcacgcggttcgatcttcaactgttcgctttcaatcttgctgaaatcgagaatatcgctgataattttcaacaacaggctggaagagttgttcattgccgtcaccagccgatcgacgcctttcggtaactctttggtttgcaacagatccaggttaccgataatgccatacagcggcgttcgcagctcatgactgacggtggcaaggaacatgcttttactctggctcgcctgttccgctgcttgtgccatctcctgcaagctctcttccatcttcacgcggctagaaacatccaccagcacacaaatggccacgttttcattacgatagcggctatggacgaagctgatttgcagattggtattgttgctggtcaggacatcaacaaaattgacctgctgcccacagataatttgcgtcagtcgttggcggtcctcatgcgtaagcatattgagataggtatgcgccagttcgttacttaaaatattgacgccatcagcggtacgcaaaatgcagatacccactggcgcggaggcgacaatcttgcgattgaactgctcatgttcttccagtcgcagggcgtcgctttccgccggaatgaaaatacgtcgctcgtacatccgtgcgagagtaaacaatgcagctccggcaagcacattcagcaaaattgcgttaaggatcaacatgcgaatgcgttccagcaccttatcaaccggcacgctatacacgatgcttaggctactgggtggcagatttttcttcagcaccagctcccggaacccttccgtatagccaaaccaggagcgttcctgcatccagcgaggatcgcccttaattttactttctggtccggtaaggctaatcagggtatgaccattttcatcaagaatggtaacccccatcggcaacgtacccggtaagaaaaagttctccatccggatggtctgctcgacacccaaaagcgcctgcaaccggttcgccagataaactggcgtcaacgcgtaaaaatacccgacgccagggcgcggaccttcgctgatccagtagaggttactgccgctatcatcttgtggtgcatttcgatatttattgatgcgttcatgcaaagctttcaacgcggtatcgcgttccactggcatatcacgcagaccgaaattggccatgcagaggttatcgctgccgattaaaaatacccggtttagatcgtaagccgcagaaaaattatcgcgccagtagcgcataaaccacgccaaactctccagagaacctcgccaggtgttactcattgcggaacaatcggagtcggcaaacagcggttcaaacgcaggcacatccgcctgcgtttctcgtccacgcggggaaagcacaccgttttctgcgcttaagcgattttcggcgatgtacttcagctctttcatcacatcagaggtgcgttgaataaagcgctgagcctgatcggaactcagattaaattcctgacgaatttcgctttctcgctgatgtaacgcattaacgatgtaaaaaacggaactaaaagcaatcaacagccagagcactaacgccaatgctctgaacatgtagcggctggctttcagggttgtacgaaaagaagcaaggtatttcaaaggggcgaagctccgcctcaggtgaccgatggagtgtggttaaggtagcggtaaaagcgtgttaccgcaatgttctctcttctctggaatatgatacaccgccgagaaatcatcaccttaacctctgataatcgtcatataccggacaagactagtggatttcagcatgcattatatgaagtggatttatccacgccgcttacgcaatcaaatgatcctgatggcaatcctgatggtcattgtcccaacgcttactattggttatatcgtagaaacggaaggacgtagtgcagtcttatctgaaaaagagaaaaaactttctgccgtggtcaacctgcttaatcaggcactaggcgatcgctatgatctctacatcgacttaccacgtgaggagcgtatccgcgcattaaatgcagaacttgcccccattaccgaaaatatcactcacgccttccctggcatcggtgctggttattacaacaaaatgctggatgcgataatcacctacgcgcctagtgcgctatatcagaataatgtcggcgttaccattgccgcagatcaccctggtcgcgaagtgatgcgtacaaatacccctttagtttatagtggcaggcaggtgcgcggcgatattttgaatagtatgctccccattgagcgtaatggtgaaatcctcggctatatctgggccaatgaattaaccgaagatattcgccgccaggcctggaaaatggatgtgaggattatcattgtgctcaccgctggtttgctgataagcctgctgttgattgtccttttctcccgtcgcctgagcgccaatattgatatcatcaccgatggcctcagcactctggcacaaaatattcccactcgattaccacaattgcccggtgaaatggggcaaatcagtcagagtgttaataacctcgcccaggcactgcgtgaaacgcggacacttaacgatctgattattgaaaacgctgccgatggcgtcattgccattgaccgccagggtgatgtaaccaccatgaacccagcagcagaagttatcactggctatcaacgccatgaactggtagggcagccttactccatgttgttcgacaatactcagttctacagtccagtactggatacgctggaacatggcaccgaacatgtggcgctggagatcagttttccaggtcgtgaccgcaccattgaactcagtgtcactaccagtcgtattcataacacgcacggtgaaatgataggtgctttggtgattttctctgatttaactgcccgcaaagaaacccagcgccgcatggcgcaagcagaacgcctcgccacactgggtgagctgatggctggcgtcgcgcatgaagtacgtaatccgttaacggctattcgtggttatgtacagatcttgcgccaacaaaccagtgacccaatacatcaggaatatctgtccgtagtactcaaagaaatcgatagtattaacaaagttattcagcaattgctcgaatttagtcgtccacgccacagtcaatggcaacaagtcagcctcaatgcattggttgaagaaactctggtactggtacaaaccgccggcgtacaagcgcgggtcgacttcataagcgaactggataatgaattaagcccgattaacgccgatcgtgaactgctcaaacaggtactactgaatatcctgatcaatgccgtccaggctatcagcgcacgagggaaaattcgcattcaaacctggcaatacagcgacagtcaacaggccattagcatagaggacaacggctgtggcattgatctcagcctgcaaaaaaagatcttcgatccctttttcaccaccaaagccagtggaaccgggcttggtctggcgttaagtcaacgcatcattaatgcccatcagggtgatattcgcgtcgccagtttgccgggctacggcgcaaccttcacgcttattttaccgatcaacccgcagggaaatcagactgtatgactgctattaatcgcatccttattgtggatgatgaagataatgttcgccgtatgctgagcaccgcttttgcactacaaggattcgaaacacattgtgcgaacaacggacgcacagcattacacctgtttgccgatattcaccctgatgtggtgttgatggatatccgcatgccagagatggacggcatcaaggcactaaaggagatgcgcagccatgagacccggacacccgttattctgatgacggcctatgcggaagtggaaaccgccgtcgaagcgctacgctgcggagccttcgactatgttattaaaccgtttgatctcgatgagttgaatttaatcgttcagcgcgctttacaactccagagtatgaaaaaagagatccgtcatctgcaccaggcactgagcaccagctggcaatgggggcacattctcaccaacagcccggcgatgatggacatctgcaaagacaccgccaaaattgccctttctcaggccagcgtcttgattagcggtgaaagcggcaccgggaaagagttgattgccagagcgattcactacaatagccggcgggcaaaggggccgttcattaaagtcaactgcgcggcgctgccggaaagcttgctcgaaagtgaactgtttggtcatgaaaaaggtgcatttactggtgcacaaaccttgcgtcagggattatttgaacgagccaacgaaggtactctgctcctcgacgaaattggcgaaatgccgctggtactacaagccaaattactacgcattctacaggaacgggaatttgaacggattggcggccatcagaccataaaagttgatatccgcatcattgctgccaccaaccgcgacttgcaggcaatggtaaaagaaggcaccttccgtgaagatctcttttatcgccttaacgttattcatttaatactgccgcctctgcgcgatcgccgggaagatatttccctgttagctaatcactttttgcaaaaattcagtagtgagaatcagcgcgatattatcgacatcgatccgatggcaatgagtctgcttaccgcctggagttggccgggaaatattcgagagctttccaacgttattgaacgcgccgtcgtgatgaatagtggcccgatcattttttctgaggatcttccgccacagattcgtcagccagtctgtaatgctggcgaggtaaaaacagcccctgtcggtgagcgtaatttaaaagaggaaattaaacgcgtcgaaaaacgcatcattatggaagtgctggaacaacaagaaggaaaccgaacccgcactgctttaatgctgggcatcagtcgccgtgcattgatgtataaactccaggaatacggtatcgatccggcggatgtataacaccaaaacttgctatgcagaaatttgcacagtgcgcaattttctgcatagccgctcattctccttataaatccccatccaatttatcccttcatattcaattagttaaataactaaatccaataatctcattctggcactccccttgctattgcctgactgtacccacaacggtgtatgcaagagggataaaaaatgaaaacaaaattgatgacattacaagacgccaccggcttctttcgtgacggcatgaccatcatggtgggcggatttatggggattggcactccatcccgcctggttgaagcattactggaatctggtgttcgcgacctgacattgatagccaatgataccgcgtttgttgataccggcatcggtccgctcatcgtcaatggtcgagtccgcaaagtgattgctagtcatatcggcaccaacccggaaacaggtcggcgcatgatatctggtgagatggacgtcgttctggtgccgcaaggtacgctaatcgagcaaattcgctgtggtggagctggacttggtggttttctcaccccaacgggtgtcggcaccgtcgtagaggaaggcaaacagacactgacactcgacggtaaaacctggctgctcgaacgcccactgcgcgccgacctggcgctaattcgcgctcatcgttgcgacacacttggcaacctgacctatcaacttagcgcccgcaactttaaccccctgatagcccttgcggctgatatcacgctggtagagccagatgaactggtcgaaaccggcgagctgcaacctgaccatattgtcacccctggtgccgttatcgaccacatcatcgttagtcaggagagcaaataatggatgcgaaacaacgtattgcgcgccgtgtggcgcaagagcttcgtgatggtgacatcgttaacttagggatcggtttacccacaatggtcgccaattatttaccggagggtattcatatcactctgcaaagcgaaaacggcttcctcggtttaggcccggtcacgacagcgcatccagatctggtgaacgctggcgggcaaccgtgcggtgttttacccggtgcagccatgtttgatagcgccatgagttttgcgctaatccgtggcggtcatattgatgcctgcgtgctcggcggtttgcaagtagacgaagaagcaaacctcgcgaactgggtagtgcctgggaaaatggtgcccggtatgggtggcgcgatggatctggtgaccgggagccgcaaagtgatcatcgccatggaacattgcgccaaagatggtagtgcaaaaattttgcgccgctgcaccatgccactcactgcgcaacatgcggtgcatatgctggttactgaactggctgtctttcgttttattgacggcaaaatgtggctcaccgaaattgccgacgggtgtgatttagccaccgtgcgtgccaaaacagaagctcggtttgaagtcgccgccgatctgaatacgcaacggggtgatttatgattggtcgcataagccgttttatgacgcgttttgtcagccggtggcttcccgatccactgatctttgccatgttgctgacattgctaacattcgtgatcgcgctttggttaacaccacaaacgccgatcagcatggtgaaaatgtggggtgacggtttctggaacttgctggcgtttggtatgcagatggcgcttatcatcgttaccggtcatgcccttgccagctctgctccggtgaaaagtttgctgcgtactgccgcctccgccgcaaagacgcccgtacagggcgtcatgctggtcactttcttcggtagtgtcgcttgtgtcatcaactggggatttggtttggttgtcggcgcaatgtttgcccgtgaagtcgcccggcgagtccccggttctgattatccgttgctcattgcctgcgcctacattggttttctcacctggggtggcggcttctctggaagtatgcctctgttggctgcaacaccgggcaacccggttgagcatatcgccgggctgatcccggtgggcgatactctgttcagtggttttaacattttcatcactgtggcgttgattgtggtgatgccatttatcacccgcatgatgatgccaaaaccgtctgacgtggtgagtatcgatccaaaactactcatggaagaggctgattttcaaaagcagctaccgaaagatgccccaccatccgagcgactggaagaaagccgcattctgacgttgatcatcggcgcactcggtatcgcttaccttgcgatgtacttcagcgaacatggcttcaacatcaccatcaataccgtcaacctgatgtttatgattgcgggtctgctgctacataaaacgccaatggcttatatgcgtgctatcagcgcggcagcacgcagtactgccggtattctggtgcaattccccttctacgctgggatccaactgatgatggagcattccggtctgggcggactcattaccgaattcttcatcaatgttgcgaacaaagacaccttcccggtaatgaccttttttagttctgcactgattaacttcgccgttccgtctggcggcggtcactgggttattcagggacctttcgtgatacccgcagcccaggcgctgggcgctgatctcggtaaaagcgtaatggcgatcgcctacggcgagcaatggatgaacatggcacaaccattctgggcgctgccagcactggcaatcgccggactcggtgtccgcgacatcatgggctactgcatcactgccctgctcttctccggtgtcattttcgtcattggtttaacgctgttctgacggcacccctacaaacagaaggaatataaaatgaaaaattgtgtcatcgtcagtgcggtacgtactgctatcggtagttttaacggtagtctcgcttccaccagcgccatcgacctgggggcgacagtaattaaagccgccattgaacgtgcaaaaatcgatagtcaacacgttgatgaagtgattatgggtaacgtgttacaagccgggctggggcaaaatccggcgcgtcaggcactgttaaaaagcgggctggcagaaacggtgtgcggattcacggtcaataaagtatgtggtagcggtcttaaaagtgtggcgcttgccgcccaggccattcaggcaggtcaggcgcagagcattgtggcggggggtatggaaaatatgagtttagccccctacttactcgatgcaaaagcacgctctggttatcgtcttggagacggacaggtttatgacgtaatcctgcgcgatggcctgatgtgcgccacccatggttatcatatggggattaccgccgaaaacgtggctaaagagtacggaattacccgtgaaatgcaggatgaactggcgctacatagtcagcgtaaagcggcagccgcaattgagtccggtgcttttacagccgaaatcgtcccggtaaatgttgtcactcgaaagaaaaccttcgtcttcagtcaagacgaattcccgaaagcgaatagtacggctgaagcgttaggtgcattgcgcccggccttcgataaagcaggaacagtcaccgctgggaacgcgtctggtattaacgacggtgctgccgctctggtgattatggaagaatctgcggcgctggcagcaggccttacccccctggctcgcattaaaagttatgccagcggtggcgtgccccccgcattgatgggtatggggccagtacctgccacgcaaaaagcgttacaactggcggggctgcaactggcggatattgatctcattgaggctaatgaagcatttgctgcacagttccttgccgttgggaaaaacctgggctttgattctgagaaagtgaatgtcaacggcggggccatcgcgctcgggcatcctatcggtgccagtggtgctcgtattctggtcacactattacatgccatgcaggcacgcgataaaacgctggggctggcaacactgtgcattggcggcggtcagggaattgcgatggtgattgaacggttgaattaatcaataaaaacacccgatagcgaaagttatcgggtgttttcttgaacatcgacggcgaaggtaaccccattaatcaccagtcaaaacttttcaccagcgtcagctcgccagcattacgcatcggtacaataaatgtttcctgtttctcattgacgcttccttcatcggtgatcagcgtcagttgggcggtggttaattccgtttcgctgcgcccaccatagtagttgatatacacctgatagcgcccgtgaattggcgcgggcatggcgaaaatctcgggtccgtaccccgtcgtgacatccatatccagtgcaccactgtttttcagcacggtgttaccgtaccaggcgtgttcgccatcgggcgtaacaacgtgaaggtcgaggtcggtattgtccgtatcccagctgagaaccagccgtaaacgtgcacgaatcgttcctgtacccggcgtactgtaaaactgcattttttgtcggctttgcccatccgggctgatgacctgcacgctgttgctgccttcagtgaaaatataagggcgtgcaaaactaccatcggattcaattctctgcggcatactggcaccgttgaccaccagccggccctgctgaactttacccgccgcagcataattctttattttgccgcggatctgcgcactgatattttgatcatctgccatgttgacggagctcgccgggtaattgatgctttgactaaaactggcatcttcgccctctgccggatgccagccactgagcggtgcatcaatctcgacttcctgcacaccttcactgtgagcgacagggctaagcgccaccagtaacaacggaagaaaaatctttcgcatagcattagtccattaataattgtcgggtcagcgtttcgatatagttctcatcaagcccggtgggataaccatcaaaggccaggtgcagatactcatgggttaaatccagccgatcctgaagcgtaaagaagttacgaataaacagccgtttctgctgccgatcggtataggggaaaccactgactaaacggcaaaccgcaaacacgtctggttcgttgtaccccgtctcagcttgtaatatacgccgccactgcggcatttttttcgccagccaggctttcgctttgggtaataactggcaggtactgcgtggcgctccccagcggctaagactgttgtcgggataagcaaacgcgagtatctgatcgtaacgctctccctgccccgcctgggccgtggcttgccgccaggaaagtgtcccttcggtagcgcgactgccatgataatgaaccggatcgcctgcatagatgagatcctgcgtccaggcggtcatcgttcgcgcccccgtggtcgctgggctagcagaaacacgctgcgtggcgctgctgtcggggatggtcaggcaatcgccttcccgattggcgttttgctgtaaaaaagtgcgaatcgccacggtcatggctttcgctgcctcagggggcgtacttttcgcctcgcgatccagaactctggcaacgtactcttcacgatcgagatggctctgcaatttcagtttgcccttttcgctcagtaaggtcgtctcaccgtggctgacaaacgtaatgtggttaccattagtaaacgtcacacgatagcgcccattaagtacgccgggatttactgccgtcgtactcttttccgctgtgattttcttcagcggatagcgggcaaacagctccacctctacacattgcccactggcaacctgcgtcggcactggcaaaacccgattaagcaccgtcgcataacgggttagtaccgttttgctggtgccactgccagtaacccacagcggtgtaccatcggttaaccagccagcaaaaccaccctgacggatttcctgtttatcatcggcaaaccagctccaggttttcacccgtacccgactaccgagcatggatgcgacaccgattttcgcctcgtccagcaccacatccagtaagacttcctgagctttgttttgcgcgggtaacgtcgctaaactatcaagcaggcttttaaccgttacgctggtttctggcttcagcgtagtcagagacgctaaccacgcaggtgcctgacgctgttgccagtattgcccccacacatctgcgccaatatgcaaccgctgcggcgcaaaatagagcccacaggaacgtaccagcgcggtatcgcgcgttatgctctccccagcctgacaacaataaacctcttccggggagtttccgcgacactggtagggctgctccggttgatgggtatcctccagccaggcgtaaacatacagtttccacaaactccctaacggcgtggtgaggctgtcaggtaatgcactgactttggtcacgccactactgctcagctgatacagttgatcgtgctgcgcaccgcgcagcaccagttgtaacggcgtctcctccgcaagtgttggcagagtaaccaacgccaatagccagacgattcagcgccagttcacttatttcacctgcatcccggtccattcactccctgccgcaacactttgctgcgcaggtgcataggaacgcacataacgagcaggaggcagaacgaattgccctttttgcgagaagcgcagcaaatggcggaaagtgaccgttcccgtcagttctttcaccggcaccatataggccagttcgcccatttcatttcgcgctttttccagcaattgcccctgctgtttcgcggcgttgggtttattgaccgaaatgccccatgttgtgcgctcaacgtcggctcccggtggcagcggtacttccacctgaccgtagcgcagaactgcatcctgctcgctggtaagcgtgatttcatcgagatacagcgcatcgctgtcaatctcattgctggtcaccggttgcagaataaagctcatctcttcttcaccagggataagccgatacaactggcgttcaacggtcaccggaatgttactttgttgagccatttttgccggctcacgtcagcggacctgcacattttgcggcgataattcgtcaccaaaagagagaatgtccggcacgccctgaccaacccaacgccagtcttcgccccctccagttaacttatgtttagcccatgcgcccgcaggcgcaggcaaaacaactggaggcattgtcgccatatatttcgccagccagttcatggccagcgcgcgctcaatagtggattgctcagcggtcaaaccacttaaaatagcggccgtctgggtagcgtcgccaccgctattaagcagcacaaccgtgtgcgccagcggctgattgctgtttgccgctttatcccacgcatattgctgaacctgtggcatcaccgtggacttcaactgcgcttttttcagcaacgtcatggttaagacgtttgccaccgcatctgccagtggagactccggtgtatcgaggatcaggctatcattgatatcgcgggtgtcttcctcagagaaatcttcagttttagttccgcgccgggcgatagcttcatccaaccctttcaacaacgttttgcacggcaaattcatctcctgcgcccatgccagcaccagcgcccgatgcaataacggcatgttatctgcctgctccgcgtagctgtcgagcatatgctgccagtattccggttgttgcgttacgccgatcgcctggctggcctgccagtcggcgtaccatgcccatgccgtaaggaaggcgtcaccattgccatcttcaccccaccaggtaaagcgcgctccgggccccgccagttgcatcagccgcagacggttatcctgaatcatctgacgaatgtcgttagcggcggcactttgatgatcggcaagcgaacgccaggcgagactgagcgggatcagacggctaccggtgttgattacgccaccccacggttcatcgactaacgcatcaagattgttgcggaaaatctcctgcggcgtttcactactttgtagccggatattgctcgcctgctcgggcaacatcagcgcgttatcgccaccaccgagcatgacatttttctgctgttcaacgggccagctgttatccacaaaagacagttttgtgctaatgctgtcctgcacttgcccattttgttgcagttctgcacttaacaagccagattgctgaatattctgcgtcagcgaaatataattcgcccctttgtgcagcgtcagcgtctggcgcatctcagcgcctgcaaatttagtcaccagcgccaccggttcgttatcctgctgactgaagataaatagtcctgccgccggtttgtcgcccacgcgatacaccgttggcatactccacttcatgtagagatttttttccgaacgcagataagcacgcccctgcccgaccagcccgtcgccgttcatcccacgcgcggtgatacgccagcgggttaacgaatcaggcatcaggaacgtgaaatacgctttgccttgtttatcggttgtgagtgacggcatccatgccgcggtatccacctcttcacgccgtggacgttcaagcatttttactcgccgctcgctgcggttagttgcgccaggcgcaaccggctcgctggagagcgcctggtcgtagctgataaacgacagactggagctggtacgcacattgttacgccccagcggatagaaaaatttgccgatattcggcgcgatttctggttgcagcgcgtagatcatttcatcgaccacgcctaccgttagctgcgcagaaacaggtttacctttcagcgacgaggttaattcgacattgaccagttcaccaggctggtaatgggttttgtccgttttcacccggatatccagctggggaacggcaactttgatcccggcgttctgaaaactgtactgaccgttacgggtatacagcaccgaaaaagtgatgttaggcgcaaaggaattgctcactggaacccgggcttcatactgggtatcgtttaaacgttgtagcgttagccagtttgccggatgcgaaagcagcgactgctgttccacgcgatcgcgttccagcgtcaataatgcttcatcaattggctccggaaaggtaatcagcatcttcgcggtttcgcctggctggtacagcgttttatccgccacgatatctaccgtaccagtatgcgccgtgctgcccttaccgctgacggcatgacttaacccagcgagaattaagccgtctttatcgcgtaatgtcagattgtagttgccaggtttagcgaaattgacggtaaaggatttgccgcctgacggtagctctccgctatggctcgtgcggtcttcgagacgcaaccattcatacgtaacaggaacctgttttgaagattccagcgcggcataacggaacacaaccgactcgccgctattactgtattgtgcggcagtacttaatgagtaatgcgccagaccgcgttcaatgaggatctctttggtggtggtgacgcgatacgccgcgccgtcactggcggagacggttaacaaatagcggctcggtttatcggcggcggggagatttaacgccacatgaccgctggcgtcggacaccgtttcgctgccttccagcgacacggggaaacgtccggcataacgcaaatcgttaccgaccattgataattgctgagcgcgcaaacttaactgcacgcgggcattttttaccggctcgccatccgggtagagcagttgcagtttgccgctgaccgcttcgccagttttgaactcttttttggcgagagctaaaccaatctcgaaatgtggcttgatgtagtttgccacgcgaaaactgctgctatagacctgattgcggtaagcaagacgtaactcataacctccggctacggcattttctggcaggcggaaacttccctgcccgccattgcgcgcatccagcgtgacattgacggtttgcaacagactgccgttggcgtccagcaccgaaagcttcgccggggcgctgacgatgggggatgaatgcaacggatcgtggaactcgcggccgatcactttaacatcgacacgatcgcctgcgcgatatagcgggcgatcggtaaaaatatacaagcgggtgttgtagatttcgctttcgtagaagaagttctcggagacaaaaacgccgccttcagcatccttacccagaatgtatgaacgttctggcgatatatgttgtaactgcaaggtaccgctgtcatcggtcacaccgcgggtcatcacgccaagaccgtcagtccacaagatctctgagccgggcttcgcttcaccctgttttttacccgcggtccacaccagaagctctttgcctgacactttgctaagcgccacggtatcggaaacaaacaccaccgtcgtcgcccgatacccaccaaccatcgcctcgacgaggtacagtcccggctcttgttggccgagaggaatataaatgttacccggctgcggcgagatgaaattgctggatgcgccttccagttttaccccttgctgcggctcgaacggtttagcctgccatagtggataacggaactgtttcaccaggggatattttttcagcggggaaaactggttgttctgtacataacgggaaggtttaataatggcattgccgagctgtaattcgggtaacgcctgagtcacattctgccgtgactgagaagagaaagtacgctgcatcacgcggcgagatttgccgtaccagttatcccacagccaggttagcgtattgttcagcccgtcgcccagatattgcggttgcaccacaatgcgatgcaggtttttctgctggcgcaaaaatgccatcgggtcaggaatacgatacaggcgaacgtccacgccgccgtactcttccatctgatagcgccgataatcacgccccggcgcttccagtcgcactttcgcctcttcactgctgctaaaactgctgtcagcaagcaaaaagaatgttcccccggcaggcggcgcatagttgctggaaggaagcgaatcatcagcattagcaagccctgttcccacaagagacagggacaagcacgctgttatcgcgccagaaaatttaaacgataaatgccaatgaaattgggattggaatcgttgggtatccatcgggtgtccttccatgtcataagttgttgcagactgactgcgcgcattccgttgtcagttttcgtggcgcttccggtgtggtagatgacgtaacgccccatccagaccattaagtgctgggcatcgccctgatcgaaaaaaatcatatcgccaggcagcgcctggtttatgtcctggccaataaactggctgttgtactgaatcaaattaatcgcggtcacataggggccggttttcccgttcccctgattccagttttgcgccagttgacgctgttcaggtgttagcgtcatctctggcggcaaatactggctagataaaccgttactttttagccatttactgtcgtgaactttcagcgtctcgttcgccgcaaatcgcaccaggcccgcacaatcctgctgataccagcgtggacttggcccctggcggagctgttcttgtgcaatgcgtacaaaccaggcgcgaaacagcccggattgttcgacattcagcatttcgctatgggcaacaacacaacacagccagcaaatcagcgccagcagcccgtgcctcatagcggctgccaggttatgggtagccactgccaggcggcaccgggttccatctgggccagcttcatgacataacgcggttgttgagataaagcgtccagcttcggcattaataaagtttgtgcggcgttataaaaaaccggttcgagattcttcggcagactggtcaacgtttcgttacgcagcagtttcgctattccttgtggattgatatagagcggaacgatgccatcagtgggtattacatccaccattgccgggcgggttttattcagtgtttgcagcgcgttattaaccagcgtgtcatcgagggagaaaagcagcgttttgttttgcatcgccaggctcacacggaaaaaataatcgctcattaattgatcgggttgcgccgcctgcgctttcggatactggccgtatcgggaactcacttcgcgacgccagatttgcgcttcgccctgctgagtctggcttaccggcaaaacaccttctggcgctttgctttcgtgcgcaccaatattttgcgtaaacagtttccctggcaattgcgcctgttcggcagtgccatcaaactgaccgacaaacagcggggtttgcaatttactgtcttcataccagcacagccccgcggcaccgtctaacgccccattcagcttgtcgttttcctggctgatgtggctaagcatctcttcggcaataccgtgactatacggcaccgccacacagaagctggctccggcaggcatactgttccataccggcgtaaaatcgaaactggcatctacgctggcggattcatcatttaacgccacaaaactgtgccagccgtcgttacccatttcgaagcgtacgccagcaaaagaaggcattaaccgctggtagccaaaccccagccacctggcgctgactacgatgcgctggcgtactggcgttttttcggcagtacgctcttccaggccaaagcttgcttgccagcgttttttgccgctcaacaaatcacctgcgatcgccgtggcttcggtatcctgctgatcatctttaaacaacatatccgtgctggaaaacaccagcatcttgtcctgataagtcgcgaacatcagggcgttattgccgttatagcgcaactgataaacaggaacagtttcactatttatcttgatgctactgatttccgttttgcttaactggctgtcgctggtagcggcaaacaacaatggctccagcagtttgcttaaaccactgcgctggatcagcaccatataatgactaagatggccttgtttatcgtgccacagcgctgcctgcgcgggctgatctaagagactgctaaagagcttatctttcagcgtgagatcgtgttcatagacaatacgacgaatgctgccttcaatgcccagacgatcggcatgattctgataatagaaaacgaaatcttcgctcagaacatcgtggagaaacggaatggtgaggagatctttgggaagctggctcagagagtcgctgtcgagaaagaggtccggctcattgagatcgatttgcagattgttgtgcaccaccagcgggctcaacgttttttctggcccactgccagcatattgcaacgcccagacgccagcggaaagcagtgctattgcgccaaaacctacaagaccatagaaccgccagcctttcgccttttttcaccactcattgccacattccttgtgtatagccagccattttttacgggcacagccaaactttaccgtgccctaatacgacaaaagcccagactttgcagcctggacttttcaattcaaacaagggagatagctcccttttggcatgaagaagtaaaattattcttcttctggctcgtcgtcaacgtccacttccggagcgatttcatcgtccccttccgcggcactgccgtcgatggtatccagatcttcctcgtcaaccggttcagcaacacgttgcagacccactacgttttcatcttccgcagtacggatgaggatcacgccctgggtgttacggcccacgatgctgatttcgctaacgcgagtacgtaccagcgtaccggcatcggtgatcatcatgatctggtcgcagtcatctacctgtaccgcgccaacaactaaaccgttacgttcggtaaccttgatggagataacccctttcgtcgcacggctcttggttgggtattccgccactgcggtacgtttaccgtaaccgttttgcgttgcggtgaggattgcgccatcgccacgaggcacgatcagagagacgactttatcgccttcacctaagcgaataccgcgaacaccggtggtgttgcagcccatcgcacggacagaagactctttaaagcgcaccactttaccttcagcggagaacagcattacttcgtcttcgccgctggtcaggtcaacgccgatcagctcatcgccgtcaaccagtttgatcgccactttaccggcggtacgcagacggttgaactcggtgaggacagttttcttcacggtaccgttagcggtcgccatgaagactttcacgccttcttcaaactcggtcactggcaggatcgcagtgatacgttcgtcctgctccagcggcagcaggttgacgatcggacgaccgcgcgcgccacgagtggcttccggcaactgataaactttcatgctatagacgcgaccacggctggagaagcacagaatatggtcgtgagtgttcgccaccagcagtcggtcgataaagtcttcttctttaatacgtgcggcagatttacctttcccgccacgacgctgcgcttcgtattcagaaagcggctgatacttaacgtagccctggtgagagagcgtcacgaccacatcttcctgggtgatcagatcttccaggttgatgtctgcgctgttggcggtgatttcagtacgacgtttgtcaccgaactgttcacgaaccagctccagctcttcacggatcacttccatcagacgatcggcgctaccaagaatacgcaacagttccgcgatctgatccagcagctctttgtattcgtcgagcagtttttcgtgctcaagaccggtcagtttctgcaaacgcagatccagaatcgcctgagcttgctgttcggtcaggtagtacagaccatcacgcacgccgaactctggctccagccattccggacgcgcagcatcgtcgccagcacgttcgagcatcgcggcaacgttgcccagctgccacggattagcaaccagcgcagttttcgcttctgcaggcgtcggcgcatgacggatcagttcgatgatcgggtcgatgttcgccagcgccacggctaatgcttcaaggatatgagcacgatcgcgagctttacgcagttcgaaaatagtacgacgggtcaccacttcacggcggtgacgaacaaacgccgcgatgatgtctttcaggttcatgatcttcggctgaccatggtgcaatgccaccatgttgataccgaaagaaacctgcaactgggtctgggagtagaggttgttgagcacaacttcaccgaccgcatcgcgtttcacttcaatcacgatgcgcataccgtctttgtcagactcgtcacgcagcgcgctgatgccttccacgcgtttttcttttaccagttccgcaatcttctcgatcaggcgcgctttgtttacctgatacggaatttcgtggacgataatggtttcacgaccggttttggcgtcaacttccacttctgcgcgagcgcggatatacaccttgccgcgaccggtacggtaagcttcttcaataccgcgacgaccgttaatgattgccgccgtcgggaagtccggccccgggatgtgttccatcagcccttcaatgctgatgtcttcatcatcaatatacgccagacaaccgttgatgacttccgtcaggttgtgcggcgggatgttggttgccatacctacggcgataccggaagaaccgttcaccagcaggttaggaattttggttggcatgacgtccggaattttttccgtgccgtcatagttatcaacgaaatcgaccgtctctttttcgagatcggccatcagttcatgggcaattttcgccagacggatttccgtataacgcattgccgccgcagagtcgccgtcgatagaaccgaagttaccctgaccgtctaccagcatataacgcaggctgaatggctgcgccatgcggacgatcgtgtcatagaccgcgctgtcaccatggggatggtatttaccgattacgtcaccaacgacacgggcagattttttataggctttgttccagtcattgcctagtacgttcatggcgtaaagtacgcgacggtgtaccggcttcaggccatctcggacatctggcagcgcacggccaacaatgacgctcatcgcataatccagataggagctcttcagctcttcctcaatgttgaccggtgtaatttctctcgcaaggtcgctcatctaaccgctatccctctactgtatcccggattcaaaggtcgcaaattataacacagccgcgcagtttgaggtaaacctatacgctttattcacatccaatgcctgatatactcgtttgtcttgccaattacggagtagaagtgccaatgaatgccgaaaaaagcccggtaaaccataacgtagaccacgaagagatcgctaaatttgaagccgtcgcctcccgctggtgggatctggaaggtgagttcaaaccgctgcaccgcattaacccgctgcgtctgggctatattgccgagcgtgctggcggtttatttggcaaaaaggtgctcgatgtcggttgtggcggcggcattctggccgagagtatggcgcgcgaaggcgcgacggtgaccggtctggatatgggctttgagccattgcaggtggcaaaactgcacgcactggaaagcggcattcaggtggattacgtgcaggaaaccgtggaagagcacgcggcaaaacatgccgggcagtatgatgtggtgacctgcatggagatgctggagcacgtccccgatccgcagagtgtggtcagagcctgtgcgcaactggtgaaaccaggcggcgatgtctttttcagcacacttaaccgcaacggcaagagttggctgatggcggtggttggtgcggaatatattttgcgcatggtgcccaaaggcacgcatgatgtgaagaagtttattaaaccggcagaattgctgggctgggtggatcagaccagtttaaaagagcggcatatcactgggctgcattacaacccgatcactaatacttttaaactcggccccggcgtggatgtgaactatatgctgcacacgcagaataagtgaggttgatgtttggccgcgccaatgcctgatgcgacgcttgccgcgtcttatcaggcctacaaatgctccccgtaggccggataaggcgtttacgccgcatccggcaaccgtgccgactagacagtgattaccatttcaccgtcatgctcaaaaaccctgccgtctgggcaaaatcatcactccctttctgccacgccacgctgccgcgcagggacactcgctgactgatattgcccgtgactcccacttttatttcaccccgttgcttcaccgcatcgtcactgatagtgctgccatcctcttcaatttccgtgctatggggatcgtgataataattcagatctaatgttggtatgacatgaacagcggtacgccattcgctgtgtaaacccagccgcgtctgaatatcatcaccctggctttgactcacgcgcgcacggttagcggcggtaaaatcatcctgctgcacgccctgataaatcacctgcgcctgcggttcaatcaccacaccacgccccggtaaccactgataccccgcctccaggctggcgataatcccgctgctgtggtaatgatctgtgccatcttcttgttcggaaacatcattgctaaaccacgcgtattgcagccagctatccagccaggccccttgcttctgattaccgtgctgaaaccagctacttgtcagcccaacggcataaccgtggttctggttatcggcgcgagttccggtcatattgctgcggctgtcgccctggttatcgctgtagccaccaacaatcccaagcatccactcgccatccgtgccccagcgcccgctaaacagatcgccgctaagttgcaccgtagaagtgtcttcatgttgagccagttgccccgctgctgtgtaatgataatctccgccgataacacgtaaattcagcgtctgaccatcgccacctgcgtgatcgcgtcgctccatcataaacgcctgatttgccgcccgcaggttattaagataaccgccaactttggcattcaacaccggctggtaagcaggcgtaggttccgggtcgggtgttggatcaggatccggcgtgggatcaggatcgggagtcgggtctggatcaggtgggcttggcggcgttacttcttggcttcgcagataccagtcgttgttatcttccaccagcgtgtagtcatacgctcccatattgacgtagccgctgcctgccagactgaactgcgcattgttttgaaactgcgtgggatcagctgcgaaatcaaccactttaatgcctgtgcttgtcggctcaccaatccctgtaatggagttaaccaccacagttgtgttgccagcagtattaccgttcatcaccaattgatcgcttacgctgtcatcgccgtttaattcgctatcgagcagtagcgtaccgccgccggtataatcaccgtttaccgtcagcgtatcgccagcgacgccattttgcaggctaaccgcaccggacgtattggtcagattgccattaaccgtcacgttggaaagataagtcaggctgtcagtttcaaggttggtattaagctcacctgtcaacgtcacaccatcggtggcattcaccagcgtcccatcgccgttaaatagactggcattaagggcgacggaagtatcctgcccggtcaggcgcaaaaccgtaccatcgctgatgtcgatagtgccgctggaaatagcatcaatactctgaatatcctgatccgcgccagtaacgaacgttgccccatcaccaacccacagactgctagcataaggaaggatatcagcaacatcacctttcagggtgccttcttcgacacgtaccgcgctctgcgttgtaccgctggcggtcagctccagtgtaccagcccccgttttagtcaatgtgctaccctcatcctgatgctgcccgctgctgtcagccatcagtgcgccccactgcgtgtctacccccgcatcaactgccacttcaccgtcggcgcgcatttcaatatcacgtccgtggcctgccgcatcactacgcgtgtcaacgtcggaggtaatctccatcacgctttcttgttgcttatcggtaaagataacctggcggttatagtgggtatctccaagctggctgttgtcgctcaccatcagcgtaccggaggcgatttgtgttgtgcccaaataactattattgtttgccagacttacctgcccgtcgctcgcatcgaccaccacgtagacgccatctttcccgtcgccgccgatatgcaaattgtcgccacctgcaagatctaccacatcctgactgccgataaccgttccgctgctgccactgacttcaaggccatcgttgtaacttgtgccgctctgccaggtggagaaatcagagagatcgagcacaccgccgtttaacacgatgctctgcggatcgtcctggagagcggtaagatctgccgcgtcgccttccaggctaagcaccgcaccatcatcaacgactatatcgccggttagcgccatgctctgcgcccctgccagcacgtagctgccgttttgcgcaatggtgagctgaccagcaccttcgatgatgccagcaaaactgccctgattaacagtaacgttgccaccagcatcgatatttaaagtgccattctgaaagcccgtcaatgcgtgcacaaaagtttgttgggtgctgccaacgtttagctcagcctgattctgatactgatcaatactccctatcgtcagaccgtagcagtcttgcggatcgtcctggcaatgcgtatcgccgacattcatcagggagttgctgcggcccagggtaacttcaccgttttcaatctgcatctcaccagtaaagtcattgttatctgcattaagtaccagatcgccggaacctgttttggtgattaacccggtaccagcaatagagtcaacagctccgtcattctctgtattgccaataaccagcgtttttccgtcggcaatatcaaaggtaacttcacttaagccgagatacataaagccacccgccgcagaggaaggaccatctccatagcctgctgcgctattgttctcatcgactaacacgcctccgttctggctgtagctgtcatcaacagaaatatcaataagatagggagccgtcacgctattggtatatatcgccccgccataaccttcggcagtgttatttgtaaaggcagtgttatttactatcgtataaccactaggatgcttgctgtcgctattattatcggtaacatcgattgccccgccatcgccatcactgtaacttgtacttgtatatgcctggttgttatcaaaaataacatcacttaaataaacgtcattattaatggtataaattgcgccacctttgccatcattagcgatgttattgcgaaacatggcgttagtgacacgtaaatcgacggcaccagtatcgttagtaccagaagaatagattgcgccaccatagccgcctgcgacgttaccggaaaaaataacatcagtaagattcagcgtactgttttctttagcaaatatggccccgccgttattatattctcctgtaacggtgttattggcaaacagagtcattccagtttcattttctggtaatagactaaattccgctccttgttgcaaaaatacggccccaccgctggcgttattggtcatatcgctaaaaaccagccattgcccatcagcgatactccagtcctgcgtaatgccactaaggctttgcctgctggcctgacaactcgctttgacatcatatccctggcaactatcagtgaccgccgcgacaccgttagcagagaaaagagatgcaatcatactcgggagtaaagataaatactccttgcgtagaaagataatccgcatattaatctaaccatcattttctataagacggcgtatttaatcgcattatacgatatggaatatctttcttttgtaaattgttcaacccggtgcaatggctattttgttattatttgatgaataatatcagtgcgtcataattcaagttaataaccttcagggatatcagttatatttaaactaaattaaagtcatgaataattttcttataatataaggtaaattaacaaaatggcttagcatttaacaataaccgaatagaaaacaaccatttcgccatcaacaatctcttacattcgcttatatattgaccacaactgatacatcagattatgtgatgactcgtgcttagatcaatttttgcaatcattagcaaaaagattaataagccatctatatcaatttatctaacctattatgccgttcaagaaatcgccgaacagttatttttaacaaatttttctcttcccattgactttcccggacaccttgtctgacctaaggtgcgcgaaagccactttttccttcctgagttatccacaaagttatgcacttgcaagagggtcattttcacactatcttgcagtgaatcccaaacataccccctatatatagtgttctaagcagcttcccgtactacaggtagtctgcatgaaactattgcggaaagaattccaaaaacaggtacgacatacatgaatcagaatctgctggtgacaaagcgcgacggtagcacagagcgcatcaatctcgacaaaatccatcgcgttctggattgggcggcagaaggactgcataacgttagcatttcccaggtcgagctgcgctcccacattcagttttatgacggtatcaagacctctgacatccacgaaaccattatcaaggctgccgcagacctgatctcccgtgatgcgccggattatcagtatctcgccgcgcgcctggcgatcttccacctgcgtaaaaaagcctacggccagtttgagccgcctgcgctgtacgaccacgtggtgaaaatggtcgagatgggcaaatacgataatcatctgctggaagactacacggaagaagagttcaagcagatggacacctttatcgatcacgaccgtgatatgaccttctcttatgctgccgttaagcagctggaaggcaaatatctggtacagaaccgcgtgaccggcgaaatctatgagagcgcccagttcctttatattctagttgccgcgtgcttgttcagcaactacccgcgtgaaacgcgcctgcaatatgtgaagcgtttttacgacgcggtttccacatttaaaattagcctgccgacgccaatcatgtccggcgtgcgtaccccgactcgtcagttcagctcctgcgtactgatcgagtgcggtgacagcctggattccatcaacgccacctccagcgcgattgttaaatacgtttcccagcgtgccgggatcggcatcaacgccgggcgtattcgtgcgctgggtagcccgattcgcggtggtgaagcgttccataccggctgcattccgttctacaaacatttccagacagcggtgaaatcctgctctcagggcggtgtgcgcggcggtgcggcaacgctgttctacccgatgtggcatctggaagtggaaagcctgctggtgttgaaaaacaaccgtggtgtggaaggcaaccgcgtgcgtcatatggactacggggtacaaatcaacaaactgatgtatacccgtctgctgaaaggtgaagatatcaccctgttcagcccgtccgacgtaccggggctgtacgacgcgttcttcgccgatcaggaagagtttgaacgtctgtataccaaatatgagaaagacgacagcatccgcaagcagcgtgtgaaagccgttgagctgttcagcctgatgatgcaggaacgtgcgtctaccggtcgtatctatattcagaacgttgaccactgcaatacccatagcccgtttgatccggccatcgcgccagtgcgtcagtctaacctgtgcctggagatagccctgccgaccaaaccgctgaacgacgtcaacgacgagaacggtgaaatcgcgctgtgtacgctgtctgctttcaacctgggcgcaattaataacctggatgaactggaagagctggcaattctggcggttcgtgcacttgacgcgctgctggattatcaggattacccgatcccggccgccaaacgtggagcgatgggtcgtcgtacgctgggtattggtgtgatcaacttcgcttactacctggcgaagcacggtaaacgctactccgacggcagcgccaacaacctgacgcataaaaccttcgaagccattcagtattacctgctgaaagcctctaatgagctggcgaaagagcaaggcgcgtgcccgtggtttaacgaaaccacttacgcgaaagggatcctgccgatcgatacctataagaaagatctggataccatcgctaatgagccgctgcattacgactgggaagctctgcgtgagagtatcaaaacgcacggtctgcgtaactccacgctttctgctctgatgccgtccgagacttctagccagatctctaacgccactaacggtattgaaccgccgcgcggttacgtcagcatcaaagcgagcaaagacggtattttgcgccaggtggtgccggactacgagcacctgcacgacgcctatgagctgctgtgggaaatgccgggtaacgatggttatctgcaactggtgggtatcatgcagaaatttatcgatcagagcatctctgccaacaccaactacgatccgagtcgcttcccgagtggaaaagtgccgatgcagcagttgctgaaagacctgctcaccgcctacaaattcggggtcaaaacactgtattatcagaacacccgtgacggcgctgaagacgcacaagacgatctggtgccgagtatccaggacgatggctgcgaaagcggcgcatgtaagatctgatattgagatgccggatgcggcgtaaacgccttatccggcctacggctcggtttgtaggcctgataagacgcgccagcgtcgcatcaggctccgggtgccggatgcagcgtgaacgccttatccggcctacggctcggatttgtaggcctgataagacgcgccagcgtcgcatcaggcacaggatgcggcgtaaaatgccttatccggcattaaactcccaacaggacacactcatggcatataccacctttagtcagacgaaaaatgatcagctcaaagaaccgatgttctttggtcagccggtcaacgtggctcgctacgatcagcaaaaatatgacatcttcgaaaagctgatcgaaaagcagctctctttcttctggcgtccggaagaagttgacgtctcccgcgaccgtatagattaccaggcgctgccggagcacgaaaaacacatctttatcagcaacctgaaatatcagacgctgctggattccattcagggtcgtagcccgaacgtggcgctattgccgcttatttctattccggaactggaaacctgggtcgaaacctgggcgttcagtgaaacgattcattcccgttcctatactcatatcattcgtaatatcgttaacgatccgtctgttgtgtttgacgatatcgtcaccaacgagcagatccagaaacgtgcggaagggatctccagctattacgatgagctgatcgaaatgaccagctactggcatctgctgggcgaaggtacccacaccgttaacggtaaaactgtgaccgttagcctgcgcgagctgaagaaaaaactgtatctctgcctgatgagcgttaacgcgctggaagcgattcgtttctacgtcagctttgcttgttccttcgcatttgcagaacgcgaattgatggaaggcaacgccaaaattattcgcctgattgcccgcgacgaagccctgcacctgaccggcacccagcatatgctgaatctgctgcgcagcggcgcggacgatcctgagatggcggaaattgccgaagagtgtaagcaggagtgctatgacctgtttgttcaggcagctcaacaggagaaagactgggcggattatctgttccgcgacggtagcatgattggtctgaataaagacattctctgccagtacgttgaatacatcaccaatatccgtatgcaggcagtcggtttggatctgccgttccagacgcgctccaacccgatcccgtggatcaacacttggctggtgtctgataacgtgcaggttgctccgcaggaagtggaagtcagttcttatctggtcgggcagattgacagcgaagtggacaccgacgatttgagtaacttccagctctgatggcccgcgttaccctgcgcatcactggcacacaactgctgtgccaggatgaacacccttcccttctggcggcgctggaatcccacaatgtggcggttgagtaccagtgtcgcgaaggttactgcggctcctgtcgcacacgcctggttgcaggtcaagttgactggattgccgaaccgttagcctttattcagccgggggaaattttgccctgttgttgccgggcaaaaggcgatattgaaatcgagatgtgaattggttgtagtgccagatacaacgcttatgcgtcttatctggcctacaacgattacatggcgtagtaatacgctttcacctgctcccagtccgctttggggattggctccagatatttttccagctggcggaagtcatgattaatcgctttatcgcgacgcaagcggcgacgacttttctccaggtcaagaaaaccagcttctgcattaccttctgttttcacatagatatggcgaacataacaacagccatgctgacgattaatgctatgcattttcttaaacgccagcgccactgctttcaacatggcttgccgtacttcgtcagaataagggcttactgcatgctgggcataccagtcagcaatgctgatgaaccccgccatatcttcagtcaccagcaacgctcgccattcaccctcaattttcaccgcttcaccaaaaacgatcttcggcacgatgacaccggcccgttccagttctttaattaccgcaacctcacggacaatcgttggtcggccgaacggataacgtacggaatgaaacagatgatgcgtcatgcgctttacatacagctttttgccgttgcgctcgacgcattgcaccccgctcataccattacggcgatagttaggctcttcaacccagtcgccctctgttgcccaccagtgattaaattcgtcgtactttgcactaactgccataccctatcgcctgtcatttttattaacgacaatgactataggtggttacctgaggaaaatcttaatgaaacgtgtcgtattaatgaatttcttttgccactactagcttgacaccgcttttacccttcatttgcagcgcatagattccaccagccactaccactaatagtgcgcccagcagataaaatgtgaatttaatcaggcggatacagcgatgaattttattcgacagggattaggcatcgccttacaaccagagttaacgctgaaaagcattgcaggtgaattgtgttccgttcctctcgaaccaactttctatcgacagattagcttgctggctaaagaaaagccggtagaaggcagtccactgtttttactacaaatgtgcatggaacaattagtggcgattggaaaaatttgatatgagacaggatggcgcatgaacgccatcctgcagtaacattactctttattaagaaattttactgccttatcagggaaatcagtaaacagcccatttacacccgctttgttatacagagcatcatataactgattcacatcaggagtgtattcaggcagtttatcactccgcacggtataaggatgcactaccagtttattctgctgagcatcttgcaccatgccagtgagtttgatattacccggctggcttgtctcctcaatcaacatatggtaatccggaccaataccatctgcatattccgccacctgtttcatggcacccggcttaaacatccagtcgtagttgtaattaacccagcttccatccggctgtttctgctgcgtttcattccagtcggtataggcaatcagctgtaccagattgagctccatgcccattttgggttccagctcattcttaatacgcttcagctcatcagcatcaaaacattgcaaataaactttatcgtctttaccggtgtaaccatatttcttcagcacttccagcgtttttgccgcaatatccttcccttcctgatgatggaaccacggcgctttgatttctggataaataccgatatttttcccggtagagtgatttaacccctgaacaaattcaatctcttcttcaaaggtgtgcacccggaagtcggacttacccattgggaaacgccccggataagtctgcacttttttaccgttttcaatatcgaaaccttcggtaaatttcaagctcttaatttcatccagcgtgaaatctatcgcgtagtaacgaccgtctttgcgcgcccgatccgggaaacgatcggcaacatcagtaacacgatcgaggtaatggtcatgcagaacaaccagattgtcgtctttggtcatcaccaaatcctgttccagataatccgctccctgcgcatacgccatcgcttttgctggcagcgtatgctccggcaaatatccactggcaccgcgatgggcgatgactattttttcgttgctgtccgccgccattgcactgcttcccatgactatagtgctcatcatgatcgccatgctaaggtttttcagcgtcaatttcatgccattagcctccgttgcgttcttgcagtaattgttcatggcgacgtttttcgccaatcatcacaacaatcaacaagataaccgccagaatgctgccgccaatcattaccataaagccgccatcccagccgaagaagtccacggtgtagccaacaatcgcgctcgccgccacgctaccgcccaggtaaccaaacagcccggtaaagcccgctgccgtacctgccgcttttttcggtgccagttccagcgcatgcagaccgatcagcatcacaggaccgtagatcaggaagccgataacaatcatacaaatcatatcgacggttgggttacctgccgggttcatccagtaaacgatagtcgcgatggtcaccagtgtcataaagaaaacgccggttgccccacggttgccacggaagactttatcgttcatccagccgcacagcagagtgcccggaatacctgcatattcataaaggaagtaggcccaggaggatttatctagcgcgaaatgcttaacctctttcagataagtcggactccagtcgaggatgccgtaacgcagcagataaacgaacacgttggcgatggcgatataccacagcagtttgttcggcagtacgtactgcatgaagatttgcttcgccgtcagctcctgttccgctttttcgttatagtcgtccggataatcatttttgtactcttcgatcggcggcaagccacaggattgcggggtatcgcgcatcatcgcaaaggcgaataatgccaccagaatggcgcagaaagcaggcatatagagcgccgcatgccagtcattgaaccaggccatccccagcaggaacagcagcggcggaataccaccaccgacgttgtgcgcacagttccacacactcacaatgccgccacgttctttctggctccaccagtgcaccatagtacgaccacacggcggccaccccatcccctggaaccaaccgcagaggaacaacagtacaaacatcaccgcaatgctgctcgtcgcccatggcacaaagcccataaacaacatcactgccgccgccagaatcaaacctgcgggcaggaaaacgcgcggattgctgcgatcgcttacgctacccatgatgaatttgctaaatccataagcaatgctgatcccgctaagggcaaaacctaaatcaccgcgactgaatccctgctcaaccagataaggcatagcaagcgcaaagttcttacgaaccaaatagtaagccgcatagccaaagaatatccccaggaaaatttgccagcgcaatcgacgataagtcggatcgatctccgcggcaggtaagcgcgctttgtgtggcgctggtttaaaaatactcaacattgatagcctccgtggcccgtggtcttatttatgattaacagcctgattcagtgagagaacctgccgtttcttgagttgccgcgatgttaagaaaacattcataaattaaatgtgaattgccgcacacattattaaataagatttacaaaatgttcaaaatgacgcatgaaatcacgtttcactttcgaattatgagcgaatatgcgcgaaatcaaacaattcatgtttttactatggctaaatggtaaaaaacgaacttcagagggataacaatgaaaactcgcgacagccaaagtagtgacgtgattatcattggcggcggcgcaacgggagccgggattgcccgcgactgtgccctgcgcgggctgcgcgtgattttggttgagcgccacgacatcgcaaccggtgccaccgggcgtaaccacggcctgctgcacagcggtgcgcgctatgcggtaaccgatgcggaaagcgcccgcgaatgcattagtgaaaaccagatcctgaaacgcattgcacgtcactgcgttgaaccaaccaacggcctgtttatcaccctgccggaagatgacctctccttccaggccacttttattcgcgcctgcgaagaagcagggatcagcgcagaagctatagacccgcagcaagcgcgcattatcgaacctgccgttaacccggcactgattggcgcggtgaaagttccggatggcaccgttgatccatttcgtctgaccgcagcaaacatgctggatgccaaagaacacggtgccgttatccttaccgctcatgaagtcacggggctgattcgtgaaggcgcgacggtgtgcggtgttcgtgtacgtaaccatctcaccggcgaaactcaggcccttcatgcacctgtcgtggttaatgccgctgggatctgggggcaacacattgccgaatatgccgatctgcgcattcgcatgttcccggcgaaaggaagcctgctgatcatggatcaccgcattaaccagcatgtgatcaaccgctgccgtaaaccttccgacgccgatattctggtgcctggcgataccattagcctgattggtaccacctctttacgtattgattacaacgagattgacgataatcgagtgacggcagaagaggttgatattctgctgcgtgaaggggaaaaactggcccccgtgatggcgaaaacgcgcattttgcgggcctattctggcgtgcgcccgctggttgccagcgatgacgacccgagcggacgtaacgtcagccgtggcatcgtgctgctcgaccatgctgaacgcgatggtctggacggatttatcaccatcaccggtggcaaactgatgacctatcggctgatggctgaatgggctaccgacgcggtatgccgcaaactgggcaacacgcgcccctgtacgactgccgatctggcactgcctggtagtcaagaacccgctgaagttaccttgcgtaaagtcatctccctgcctgccccgctgcgcggttctgcggtttatcgtcatggcgatcgcacgcctgcctggctgagcgaaggccgtctgcaccgtagcctggtatgtgagtgcgaagcggtaactgcgggtgaagtgcagtacgcggtagaaaatttaaacgttaatagcctgctggatttacgccgtcgtacccgtgtggggatgggcacctgccagggcgaactctgcgcctgccgcgctgccggactgctgcaacgttttaacgtcacgacgtccgcgcaatctatcgagcaactttccaccttccttaacgaacgctggaaaggcgtgcaacccatcgcctggggagatgcactgcgcgaaagcgaatttacccgctgggtttatcagggattgtgtggtctggagaaggagcagaaagatgcgctttgatactgtcattatgggcggcggcctcgccggattactctgtggcctgcaactgcaaaaacacggcctgcgctgtgccattgtcactcgtggtcaaagcgcactgcatttcagttccggaagcctggatttgctgagccatctgccagatggtcaaccggtgacagacattcacagtggactggaatctttgcgtcagcaggcaccagcccatccttactcccttctcgagccacaacgcgtgctcgatctcgcttgccaggcgcaggcattaatcgctgaaagcggtgcgcaattgcagggcagcgtagaacttgctcaccagcgggttacgccgctcggcactctgcgctctacctggctaagtagcccagaagtccccgtctggccgctgcccgcgaagaaaatatgtgtagtgggaattagcggcctgatggattttcaggcgcaccttgcggcagctagcttgcgtgaactcggccttgccgttgaaaccgcagaaatagagctgccggaactggatgtgctgcgcaataacgccaccgaatttcgcgcggtgaatatcgcccgtttccttgataatgaagaaaactggccgctgttacttgatgcgcttattcctgtcgccaatacctgcgaaatgatcctgatgcccgcctgcttcggtctggccgatgacaaactgtggcgttggttgaatgaaaaactaccttgtagtctgatgcttttgccaacgctgccgccttccgtgctgggcattcgtctgcaaaaccagttacagcgccagtttgtgcgccagggtggcgtgtggatgccgggcgatgaagtgaaaaaagtgacctgtaaaaatggcgtagtgaacgaaatctggacccgcaatcacgccgatattccgctacgtccacgtttcgcggttctcgccagcggcagtttctttagtggcggactggtagcggaacgtaacggcattcgagagccgattctcggccttgatgtgctacaaaccgccacgcggggtgaatggtataagggagatttttttgcgccgcaaccgtggcagcagttcggtgtaaccactgatgagacgctacgcccgagtcaggcagggcaaaccattgaaaacctgtttgccatcggtagcgtgctgggcggatttgatcccatcgcccagggatgcggcggcggtgtttgtgccgtcagtgctttacatgccgctcaacagattgcccaacgcgcaggaggccaacaatgaatgacaccagcttcgaaaactgcattaagtgcaccgtctgcaccaccgcctgcccggtgagccgggtgaatcccggttatccagggccaaaacaagccgggccggatggcgagcgtctgcgtttgaaagatggcgcactgtatgacgaggcgctgaaatattgcatcaactgcaaacgttgtgaagtcgcctgcccgtccgatgtgaagattggcgatattatccagcgcgcgcgggcgaaatatgacaccacgcgcccgagcctgcgtaattttgtgttgagtcataccgacctgatgggtagcgtttccacgccgttcgcaccaatcgtcaacaccgctaccagcctgaaaccggtgcggcagctgcttgatgcggcgttaaaaatcgatcatcgccgcacgctaccgaaatactccttcggcacgttccgtcgctggtatcgcagcgtggcggctcagcaagcacaatataaagaccaggtcgctttctttcacggctgcttcgttaactacaaccatccgcagttaggtaaagatttaattaaagtgctcaacgcaatgggtaccggtgtacaactgctcagcaaagaaaaatgctgcggcgtaccgctaatcgccaacggctttaccgataaagcacgcaaacaggcaattacgaatgtagagagcatccgcgaagctgtgggagtaaaaggcattccggtgattgccacctccagtacctgtacatttgccctgcgcgacgaatacccggaagtgctgaatgtcgacaacaaaggcttgcgcgatcatatcgaactggcaacccgctggctgtggcgcaagctggacgaaggcaaaacgttaccgctgaaaccgctgccgctgaaagtggtttatcacactccgtgccatatggaaaaaatgggctggacgctctacaccctggagctgttgcgtaacatcccggggcttgagttaacggtgctggattcccagtgctgcggtattgcgggtacttacggtttcaaaaaagagaactaccccaccagtcaagccatcggcgcaccactgttccgccagatagaagaaagcggcgcagatctggtggtcaccgactgcgaaacctgtaaatggcagattgagatgtccacaagtcttcgctgcgaacatccgattacgctactggcccaggcgctggcttaaactcctttctgatgcccggtaagcatgtggttaccgggcatttttgcgtacacgattccgtgcccaatgtatgcgttgcaacgcagtgaaaattcctctgaaaacgtctcgcaaaggctgaaactggcagatgtcaaaggcctgggataaccgtaatgtcgcgtcatcataaatatcaggtgacggacaaccatgaccgaaagtacaacctcctccccgcatgatgcggtatttaaaacctttatgttcacacccgaaaccgcacgggattttctcgaaatacatttaccagaaccactgcgcaagctttgcaacctgcaaaccttacgcctggaacccactagttttattgaaaaaagtttacgcgcttactacagcgatgttttgtggtccgtggaaaccagcgacggtgacggctatatctactgcgtgattgaacatcaaagctctgcagaaaagaatatggcttttcggctaatgcgctatgccactgccgccatgcagcgtcaccaggacaaaggctatgacagagtcccgctggtggtgccgttgctgttttatcatggcgaaaccagcccttacccgtacagtctcaactggctggatgagtttgacgatccgcaacttgcccggcagttgtacaccgaagcttttctgttggtggatatcaccatcgtacctgacgatgagatcatgcaacatcggcgtatagctctgctggaactgattcaaaagcatattcgcgaccgcgatttaatcggcatggtcgacaggatcaccacgcttttggttagaggcttcactaatgacagccagctacaaacactgtttaattatctgctgcaatgcggcgatacctcccgtttcacccgttttattgaggagattgccgaacgtagtccactacaaaaggagagattaatgactattgctgaacggctacggcaggaagggcatcaaattggctggcaggaaggtatgcatgaacaagccattaaaattgctttgcgcatgctggagcagggctttgaacgtgagattgtgctggcgacaacccaactcactgatgctgatattccgaactgtcattaaaaggagagattaatgactattgctgaacggctgcggcaggaaggacatcaaattggctggcaggaaggtaaattagaaggtttgcatgaacaagccattaaaattgctttgcgcatgctggaacagggctttgatcgtgaccaggtgctcgcggccacccagctaagcgaagccgatctggcagcgaataaccactaattaacacaggcccacagccgatccccatgggcctttgatatcaataactaccttttatgcgtggcccatttttgccacttttaaacatcgccagtcgttgatccagggcatcgctgtagagcatcgtgtcaacgccaacagcgacaaagttcgctccccacgccaggcattgctgcgccatatcaggagccacagccagaaaaccagccgctttacccgcagcacggatccgccgaatactggtttcaataattcgctgcacttccgggtgcccggcgttatccgggtagcccaagctcgcagaaagatccgcaggtccaataaacacgccatcaatcccttcgacgtcgaggatttcgtccaggttatccagtgccgttttactttccacctgcaccaacagacaaaggctatcgttaacttgcgccatgtaattctcaatgcgtccccagcgcgcagcccgtgccacactggccccgacaccacgctcaccgtagggaggatagcgcgtggcagacaccacctgacgtgcctgttcggcagtatcgaccatcgggatcagtagagtttgcgcgccaatatccaggacttgtttaatcagcggtttactgccttccaccggacggatcacgggttggctggcatagggcgctaccgcctgtagctgatgataaagatcctgaatggtgtttggcgcgtgctccccgtcaatcagcaaccagtcataaccagaagtggcggcaatttctgccatataggcagtcgtactgcttaaccacagaccaatttgcacttcgcccttgcgtaaacgttctttaaagggattgcttaataatgcgttcatcgtgttccttaacctatttaatgatgtgccacgtcggtctgcgcaacagtgcgatttacacgcagagtgaaaataatcaggctaccgatgaccgccaccgctgccagcgtcagtaatcccgccgcatcgctggcaaataacgtttctgctttcacgcgcaggatcggggcaataaacccgcccactgcaccaaacaggtttacaaaaccaattcccgcagccagcgccgtaccggaaagcagttgtgtcggcatcgtccagaacactggctgcacggcaataaacccgatagctgcaacacacagcgctacgatcgccattactggagaaagcagcccggacagaccaataccaatgcccgccgccagtaatgtcagcgctgcgacattacgccgttcgccggttttatcggaatagcgcggaataagccaggtcccaaacaaggccgcaacccacggaatggcggtgaccacgctcgctgtaaagcccacttttgttcccagcaatgccgcaacctgggtcggcaggaagaaaattaatccgtaaaccgccacctgaatggtcaggtagataatcgctagttgccagactcggccattacgcagcgcatcgctcagccgagaagtcactttctgttgttcttcacttgccagttgattgataagcaacgttttttcttgtttactcagaaaacgtgcctgctccggtgtgtcatcaagccaaaagaatgtgaataccccagcaccgactgccaacaatccttcaatcacaaacatccagaaccagccgggatgccccataaatccatgcatctccaacagcgcgccggaaagcggacttcccagtgttaacgccagcggtgcgcccatatagaacagccccataatgctggcgcgattacgctgcggaaaccattggctggtgagataaatcataccagggaaaaatccggcctccgcagcacgaagcagagtgcgaactatcagaaatttcgcttcagtatcggcccatgccatggctgcgctaagaaatccccacagcagtgttgtcgtaccaatccaggttctggcccccagtttgcgcatcaaaagattcgccggaacacccagaaacgcatataccacaaagaaaatgcctgctcccagcgcataagcttcattactcaacccggtatcaatctggtaggtctgtttggcaaaaccgatattgctacggtcgagaaacgccagcacatacagcgccaacataaacggaattaaacgcacacggtttttcttcaccacggcgtcaagcaaagcggtgctcataaaaagctccttagaatatgtgggcgttaccgttgtcacagcaacgcccggagtgattagtggctgtaggggcgtttcaaattgcagtcatgattgagttcgacgccaaaaccgggtttatcaagcacacttttatgaatacgaccattcaccggaaccggctcattgagcagaatcgggtcaaactgcggacgcatcgtactacaatccgggctggtcatcaggaattcgctgaatggcgtattggtgaaggtgatcaccgcatggtgagagtaaacagagctaccgtgcggcaccaccagttgccccctggatttggcgattgcggcaatttccaccagcgtggttaaaccaccgcaccagccaacatccggctgcataatgtcgataccggtttcactaagcgtacgaaaagattgcagtgtgccgtggtgctcaccgctggtgaccatcattccgactggcgcgttgcgtttcagttcgcgataactttcatactgctgtggcggcaggcactcttcgatccatttcaggttatagggcgcgcaagcgtgggccagtttggtcgcatagttcacgtcctgactcatccagcagtcgagcattaaccagaaatcctcaccgcatttttcacgcatatccgcgaccatagcggcatctttgcggatccccgcatcgccatcatgtggcccccagtgcgtcggcattttgccaccgataaagcccatctcttttgccagatccggacgcgcacctgtggcgtagaactgaatctcatcacgaacagcgccgcctaaaagtttataaaccggaagcccgaccactttgccgaacagatcccacagagccagatcgacacaagaaatcgtattcatcaccaggccaccagagccggagtaatacagggtggcactgagcatttgatcgtggatcagtttgatatcactgacacatttaccctcaatgaaacggttaagatgtttttcgacaataaaacagcccatttcaccggctgtgctaacggcgaatccggtctggccgttttctgcttcgacttcaacaaccaacgtgccaagaacgttaatgccaaaactctggcgactctgctcgtaatcgcggtatttactcatcggggtggcaatatgatcgtctatccagtgattcgccccctggtcgtgataatcaccgccgccagcgcctttttctgctgtcgcaccgccagtaaaccaggcgcgaacctgtttaatttttggtagggtcatgatgttctccattgttaactggcttgtaagtcaaagggacttttccatcccaacagacgactaatatccctggcgcaggcaatggccttgcccgccagataatcacggtattcttcattgatttgtaagcgggtaccgaccacgctgatcgcagcggtaagctcgttattggcgttaaacaccggcgcagcgacacaacggacatcggcgtaatcttcgccgttgtcatagctccagccctgacggcgaatacgcgccagttcttcgtgaagttgctgtggatgagtaatcgttgtgggtgtcgcctgctcccagaccagcccttcgataatactttgctgtaccgctgcaggttgccaggcaagcaggcatttacctattccggagcgataaaggctaaggctttttccttcatgggaacgcacgctgatagtggcactactctccactttcaaaatgtaataagcgctgccgttatcaataatccccaggtgacataacagcccggtggtatccatcagttgcgtcaaacgcggtcgagccagttcccggagatccatcttgcttaacgcatgaccggaaagctccaccagcctggtccacaaacaaaaattttcctggtgatcaaggctaagaaaacgctgacgcctgagttcattaagcagcaaataggccgtgcttttagggattcccaatgtgtcaatgatcgtcgcagcactacaggggccaatgcgggcaatcaaattgagaatatcaatagcccgtgtcagggcgggaactttgctactttccaacatactggactccagtcttagatactggaatcagtctcgttgctcagggggagtaaaattgtgaagcgcatcaaatcccgctcctcgtccagcagactggagaaattacgcacaaatttgtgaatcagcgcacggattttttcttattgagtacaacaggttggacaaattttgccggagggggaatgtgccggtgcagtaaaccggcacagagtggcggaatcagacagataaggtcatggactcaacaacctcaatccagccatgctcactggcgatatcctggccgtttaaccaacggcgcagcatattcagtgccatcattgcgcacacttcctgacggatagccaggctgtagcgcgtagtgctgaaacgcacacgcagagcgaaagtgccgtctggcgtggctagcgcaaagttgagatgctcgttctcgaaaccgctaacagccagtgccagcccggcaaaatggttggcccgccgttctgtaatccagtgcgcagtttgcgccagggtttcctcctgactaggaaccacttcacacgccagcaatggagcacctgcgcgagaaagttgcaaagccaataaaccaccggtgaattgctcgctcaacgtcaggctgaactggcggttttgcaattcgcgactgatctgcgcgggcagtccttcagtgccttcgaaaatcacgctctgtccggcaacacgtttaacatccagccacagtttttccatcgcctgttgctcgcttgccggtccggtgagtttcagttcgatgataggcatactggagcgatagcccattgttacgcccggcggcagttgtagagtgtccaggctttgtgccagatcgctttcgctacgaccaaaagtagtcaaacgcagacaaaccggcggctgcggtaaagaaaaacgctcgcgcaggcgcggcaggatttcgtgctcgaccatcaccttaaattcactcggtacgccgggagtaaagaacatcaggcaacgattaagctgcacggcaaaaccacaggcggtgcctaccgggttattgataaattcagcactggcaggcagctccgcttgtttacggttgctcggtgccattactcgtccacgttcgtggaaatagcgttccatctctttgagccaggcttcatgcagcaccaggccttcaccttttgctgtcgcagcggcgagtgcgcttaaatcatcgctggtcggtcccagcccgccgttaacgatcagcacatcggcgtgctgactacgttcgcgaagaatggtgactaagtcatcaaggttatcccccaccgtattgcggcgagataatggcaacccctgatgaaagaaaaaatcggccagccaggcagcgttagtgtcaacgatttgcccgtgtaacacttcatccccggtggataacatttccacttttaacatggttatctcctgcttttgttatcgaatcactataacgcaaagggagataaggcgtagtaagaaactgaatggcgcgacagaatgccgcgccggaagggatcagaaactggcgttaaccccaacatacgggccgtcagccacggcgttgtcgcggttaccgtctttaccgctcagattcaggtagcgataacccgcctcaatactgactggacgcataatggtgtaacgcgcgccagcattcgcttcttcataactttgaataccgctggagaggctatccggagagtagtaatactcgccaaacaaacggaagctgttgccaattttccactgcaaaccacctcctaccgctgcggcataaccttcatcgccgtaattcgggttggtgtaaacgccttttccgccaacggtcgccattaacggcccgagaggcagattcaaccccagccccacgccagcgacatcaccgtcgtcgtcgttatgtgtccagttaccgcttaacgccaggcccgtcgtttcagtcccaaaaccgacaccaatattggtgtattctttacccgcctgaccgctgatgctcattgcattgacgcttgcagaaaccaacagcattccggccagacctgctagcgcaatttttttcattatcccctttcccacaagcaattaatcaaaattcccaaagctgcgggattgtactgcctggcacagaggattcaatgagcgaaaaaaaggatctagtcacttattgtaactaaatacttcttaaataattaaatgccgaaaaaataaacacactttatcgatacacacaaaaataataataagtacagttatcatcgcaaaagagattactgtcactttcacatatttgtgagttaccgtattctcatggtttctttttatttataaggaatatccctgtgcgacaacggactattgtatgccctttgattcaaaatgatggtgcttatttgctgtgtaaaatggccgacgatcgcggcgttttccccggtcaatgggcgattagcggtggcggcgtggagcctggcgaacgaattgaagaggcactacgccgcgaaattcgcgaagaactgggagaacagctgcttttgacagaaatcacgccgtggaccttcagcgatgatattcgcaccaagacgtatgcagatggtcgcaaggaagagatttatatgatttacctgatttttgactgcgtttctgccaaccgagaagtgaaaataaacgaagagtttcaggactacgcgtgggtaaaacctgaagatctggtgcattatgatttgaatgtcgccacccgaaaaacgttacgtttgaaaggtcttctgtaacaatgatgacagccattactggctgtcagattgaaaatttagtggttaacgaattccccatccagataaactttgcctttttccacatgcatgactaaaccatccagataatcaggtttaaatgtcgcgtcacgcttatctttagcaatatatgtcaggcaatgattatgggtgaaaataacgatatttttatcaggcgctttgctttgtaagtccttaattgcactataaatctcattaccgcactgaagaagtcgtttatctaccgtcaattttttacccgcactaaaccaggtagcgctctgaatggtccggacggtattactggaataaagatcgaaatcagggatatcagcactaaaagcgttgcccagttcacgggcatcctgggtacctttaaccgtaatacctgttttatcactcaagcattgattggtactacggtcgcaacgttcagcatgacgaaacaaaacgacaaccgggtgctgctgtgccagtctggccagtgttttattgtcgatacgtggcaaaccattgctactccaggcggcatgagtacccagtccggcaattgcagcgagcgccagtaaaatgatgatatattttttactcttcaagctagagcggcaaaaagctaacacgtaaactccacctatagacaagcgcaaccagacaattaccgtgaaattgagctacatttctggcgataattcgcagttggtgtaatattaaaaatcctacgatgtcggcaaaatgcctcaaaattttgccaaatgcaaagcctaaataagaaaaaatataaaaatttcaatatttacgtctaatattagtttcttaaggttaagttaatattctatccttaaaatttcgctccaaatggcaaaatatacacaacactctttatagcaaatataagtggacaggtattcaatggcggaaggaaaagcaatgagtgaatttttgccttttagccgaccagcaatgggcgtggaggaactcgctgcagttaaagaggttctcgaatccggttggatcacaaccggtccgaagaatcaggcgcttgagcaagctttttgccagttgacgggaaatcagcatgccatcgcggtcagtagtgccaccgccggaatgcatatcacgctaatggcgttgaaaattggcaagggcgatgaagtgattacgccttccctgacctgggttagtaccctcaatatgatttccttgttgggtgcaacgccggtaatggtggatgtcgaccgcgatacgctgatggtcacgcctgaagctatcgagagtgccattacgccacgcactaaagccatcattccggtgcattatgccggtgcgccagcagatattgacgccattcgcgccattggcgaacgttacggcatcgcagttatcgaagatgctgcccatgccgtcggtacgtattacaaagggcgacatattggcgcaaaaggtaccgctatttttagttttcatgccattaaaaatattacctgtgctgaaggtggcctgattgtaactgataatgaaaaccttgcccgccagctacggatgctgaaatttcacggtctgggtgtcgatgcctatgacagacaaacctggggccgtgcaccgcaggctgaagtcttaacaccgggctataagtacaatctgaccgatattaacgccgcgattgccctgacacagttagtcaaattagagcacctcaacacccgtcggcgcgaaattgcccagcaatatcagcaagcactggcagctctcccctttcagccattaagccttcccgcctggccgcacgttcacgcctggcatctgtttattattcgtgtcgatgaacaacgttgtggtatcagtcgcgatgcgttgatggaagcgttaaaagaaagaggcattggtaccgggttacatttccgcgccgctcacacacaaaaatattatcgcgagcgttttcccacgctgagcttaccgaataccgaatggaatagcgaacgcatctgttctttgccgctgttcccggatatgactaccgccgatgccgaccatgtcatcacagcccttcagcaactcgcaggacaataagccatgtttgaaatccaccctgttaagaaagtcagcgtggttattcccgtttataacgagcaggaaagcttaccggaattaatcaggcgcaccaccacagcctgtgaaagcttggggaaagagtatgagatcctgctgattgatgacggcagtagcgataattccgcgcatatgctggtcgaagccagtcaagcggagaacagccatattgtgtctattttgcttaaccgcaattacgggcaacatagtgcgattatggcgggattcagtcacgttactggcgacttaattattacccttgatgccgatctccagaatccgccagaagaaatcccccgcctggtggcaaaagccgatgaaggttacgacgtggtagggactgtacgccagaaccgccaggacagctggtttcgtaaaaccgctagcaagatgattaaccggcttattcagcgcaccactggcaaagcgatgggtgattacggttgtatgctgcgcgcctatcgccgtcatattgtcgatgcgatgttgcactgccatgaacgcagcacctttatcccgattctggcgaatatcttcgcccgccgtgccattgaaattccagtacatcatgccgagcgtgagtttggtgaatccaaatacagttttatgcgcctgattaatttgatgtacgacctggtgacctgccttaccacaacgccgctacgtatgctgagtctgctcggcagcattattgcgattggaggttttagcattgcggtgctgctggtgattttacgcctgaccttcggaccacaatgggcggcagaaggcgtctttatgctatttgccgtgctgtttacttttattggcgctcagtttatcggcatgggattactcggtgaatatatcggcaggatctacaccgatgtccgcgcccgcccccgctattttgttcagcaagttatccgtccatccagcaaggaaaatgaataatgaaaaccgtcgtttttgcctaccacgatatgggatgcctcggtattgaagccctgctggctgccggttacgaaattagcgccatttttacccatactgataatcccggtgaaaaagccttttatggtagcgtggctcgtctggcggcggaaagaggcattccggtttatgcgccggataacgttaatcatccgctgtgggtggaacgcattgcccaactgagcccagatgtgattttctctttttattatcgccatcttatttacgacgaaattttgcagctcgctcccgcaggtgcatttaatctgcatggtagcctgttaccaaaatatcgtggtcgcgcgccgctgaactgggtgctggtcaacggtgaaacggaaactggcgttacattgcaccgaatggtgaaacgtgccgatgccggggccattgtggcgcaactgcgcattgccattgcgccagacgatatcgctattacgctgcatcataaattgtgccatgccgcgcgccagctactggaacagacattacccgccattaaacacggtaatattctggaaatcgcccagcgcgaaaacgaagccacctgttttggtcgcagaacgccggatgacagtttccttgaatggcataaaccggcatccgtactgcacaacatggtacgtgccgttgccgatccgtggccgggtgccttcagctatgttggcaatcagaaattcaccgtctggagcagccgtgttcatcctcatgccagcaaagcacagccggggagcgtgatttctgttgcgccactgctgattgcctgtggcgatggcgcgctggaaatcgtcaccggacaggcgggcgacggcattactatgcagggcagccaattagcgcagacgctgggcctggtgcaaggtagtcgcttgaatagccagcctgcctgcaccgcccgacgccgtacccgggtactcatcctcggggtgaatggctttattggcaaccatctgacagaacgcctgctgcgcgaagatcattatgaagtttacggtctggatattggcagcgatgcgataagccgttttctgaatcatccgcattttcactttgttgaaggcgatatcagtattcattccgaatggattgagtatcatgtcaaaaaatgtgatgtcgtcttgccgctggtggcgatagccacgccgattgaatatacccgcaacccgctgcgcgtatttgaactcgattttgaagagaatctgcgcattatccgctactgcgtgaagtaccgtaagcgaatcatcttcccgagtactagtgaagtttatgggatgtgtagcgataaatacttcgatgaggaccattctaatttaatcgtcggcccggtgaataaaccacgctggatttatagcgtaagtaaacaattacttgatcgggtgatctgggcctatggcgaaaaagagggtttacagttcaccctcttccgcccgtttaactggatgggaccacgactggataaccttaatgcagcgcgaattggcagctcccgcgctattacgcaactcattctcaatctggtagaaggtagtccgattaagctgattgatggcggaaaacaaaaacgctgctttactgatattcgcgatggtatcgaggcgttataccgcattatcgaaaatgcgggaaatcgctgcgacggtgaaattatcaacattggcaatcctgagaacgaagcgagcattgaggaactgggcgagatgctgctggcgagcttcgaaaaacatccgctgcgccatcatttcccaccgtttgcgggctttcgcgttgtcgaaagtagcagctactacggcaaaggatatcaggacgtagagcatcgtaaaccgagcatccgcaatgcccaccgctgcctggactgggagccgaaaattgatatgcaggaaaccatcgacgaaacgctggatttcttcctgcgcaccgttgatcttacggataaaccaagttgacctaagatcttacggataaaccatcatgaccaaagtaggcttacgcattgatgtcgatacctttcgtggcacccgtgaaggcgtgccgcgtctgctggaaatcttgagtaagcataatattcaggccagcatttttttcagcgtcggcccggacaatatgggccgccatctctggcgactggtgaagccacagtttttgtggaagatgctgcgcagtaacgcggcaagcctttatggctgggatattttactggcaggtacggcctggccaggtaaagagattggtcatgccaatgccgatatcattcgtgaagcggctaaacatcacgaagtcggcctgcacgcctgggatcaccatgcctggcaagcccgtagcggtaactgggatcggcaaacaatgatcgacgatattgcacgcggtcttcgcactctggaagagattatcggtcaaccggtaacctgttctgccgctgcgggctggcgtgccgaccagaaggtgatcgaagcaaaagaagcgttccatttgcgctacaacagcgattgtcgtggggccatgccgttccgtccattgctcgaaagtggaaaccctggcactgcgcaaattccggtgaccttacccacctgggatgaagtgattggtcgggatgtgaaagcagaagattttaacggttggttactcaaccgcatcctgcgagataaaggcacgccggtttataccattcatgcagaagttgaaggctgcgcttatcagcataattttgtggatctcctcaaacgcgcagctcaggaaggcgtgacattttgccctttaagcgaactgttaagtgagacgttgccgctcggacaagttgttcgcggaaatattgccggacgtgaaggctggctgggttgccaacaaattgcgggtagtcgctgatgaaaagcgtacgttaccttatcggcctcttcgcgtttattgcctgctattacctgttaccgatcagcacgcgtctgctctggcaacccgatgaaacgcgttatgcggaaatcagtcgagaaatgctggcatccggcgactggattgtgccccatctgttagggctacgttatttcgaaaaacccattgccggatactggattaacagcattgggcaatggctatttggcgcgaataactttggtgtgcgggcaggcgttatctttgcgaccctgttaactgccgcgctggtgacctggtttactctgcgcttatggcgcgataaacgtctggctctactcgccacagtaatttatctcagtttgtttattgtctatgccatcggcacttatgccgtgctcgatccgtttattgcattctggctggtggcgggaatgtgcagcttctggctggcaatgcaggcacagacgtggaaaggcaaaagcgcaggatttttactgctgggaatcacctgcggcatgggggtgatgaccaaaggttttctcgcccttgccgtgccggtattaagcgtgctgccatgggtagcgacgcaaaaacgctggaaagatctctttatttacggctggctggcggttatcagttgcgtactgacggttctcccttggggactggcgatagcgcagcgggagcctaacttctggcactattttttctgggttgagcatattcaacgctttgcactggatgatgcccaacatagagctccgttctggtactacgtgccggtcatcattgccggtagcctgccgtggctgggattactccccggtgcactgtacacaggctggaaaaaccgcaagcattccgcaaccgtctatttgttgagctggacgataatgccgctgctgtttttctccgtcgctaaaggtaaattgcccacctatattctttcctgctttgcatctctggcaatgctgatggcgcattacgctttgctggcagcaaaaaataatcctctggcgctgcggattaatggctggattaacatcgcttttggcgtcactggcattattgccacatttgtggtctccccgtggggaccaatgaacacgccggtgtggcaaaccttcgagagctataaagtcttttgtgcctggagcatttttagcctatgggcatttttcggctggtacaccttaacaaacgtcgaaaagacctggccttttgccgcgctttgcccgctggggctggcgttgctggtaggatttagtattcctgacagagttatggaaggaaaacatccgcaattttttgtcgagatgacacaagaaagtcttcagccaagccgctatattcttactgatagcgtcggtgttgccgcaggtctggcatggagcctgcaacgcgatgacatcatcatgtatcgccagacaggtgagttgaaatacggccttaattatccggatgcgaaagggagatttgtcagcggtgatgagttcgcaaactggcttaatcaacatcgtcaggaggggattattactctcgtgcttagcgttgaccgcgatgaagatatcaacagtctcgccattccgcccgcagatgccatcgatcgtcaggagcgtctggtgctgattcagtatcgtcccaaatgatctggctaacattagtctttgccagcttgcttagcgttgccgggcagttgtgtcagaaacaggcaacctgctttgtggcgataaacaaacggcgcaaacatatcgtgctgtggctgggactggcgctggcttgtcttggtcttgccatggtgctctggctgctggtcttgcagaacgtaccggtaggcattgcttacccgatgttaagtctgaattttgtctgggtgacgctggctgcagtaaaactgtggcacgaaccggtaagcccgcgtcactggtgtggggtggcgttcattattggcggcattgtgatcctcgggagtacggtgtaatgggcctgatgtggggattattcagcgtcattattgccagtgttgcgcaattaagcctgggttttgcggcgagtcatctgccgccgatgacgcacttatgggattttatcgcggctctgttagcttttggcctggatgcccggatactgttactcgggctgctgggttatctgctttccgttttttgttggtataaaacgcttcataaacttgcgctaagcaaagcctatgccttgctcagtatgagttatgtgctggtatggattgctagtatggtacttcccggctgggaagggacttttagcctgaaagcactactgggagtagcctgtattatgagcgggttgatgctgattttcctgcccacgacaaaacaacgttactgagttttccctgccactttacactgccgttcccactcatcggggctataactgcttgcgctgaggactttcaccgtatgcagcttttcacgattaatacaataaagcgcattctgcaaagggctgagtaaatcccccactttcacggcgaagtcactcttcacttcggcgatcatttttatcgcgccgccagcatcgcagagcataagtacatgtctgttatcttgtttattgcagcagctttttttgaccagccattccattgcattatcctgtttgctaagagttttcacatcaatttacagattaacagataaactctttatcaacggcaatggaatggcagaaatgagaagtgaaacggagggttaattattgctgacgttgcacccactcttttagcgcctgacgactaattttaataccgccgtttttcagctccggcggcagagttagccagcgcaccggttgttgaaaacgggccagcttatctttcacccattcactaagatcaacgctctcgtggtcatactccatcaccgccaccggtcgatgaccaaactccttgtcggcaacggggacgataaacacctgcaaaaccgcaggatgtgcagcaattacgcgctcgacttcttccggctgaataccctctccgccactgaagaatagattgtctaaacgtccgacaatggtcagcttgccattatgcatctcaccgcgatcgcgcgtagcgtaccagccttcgtcattaaccagactaaccagttgcccgttacgccagtaaccttctgccatactggcagcccgcagccacacttcattattaacgattttcacttcccgacccggcagcgggctaccaacgtctgccaggccgtcggcttctttcgcacacaccgtggaggcaaactcggtcagaccatagccgcaaaagcaacgaatcccctgctcgcgcgcctgttccgtcaactcgaccgggatagccgcgccgccaagtaacaccgctttcagggaaacggaactacggttaaccagcaaacgccagagttgtgttggcaccagactagcgtgagtacagcctgccagcatttgctccaatggctgtttatcacgtaccgtcatccgcgcaccagcgtataaccagcgccacataattccctgaccggagacgtgaaacagcggtaaagagagcaaccaatcatcgtgatcgccaaacggaatcaggcttaacacaccttgcgcactggcaagatgggcctgataagtatggacagcggctttcggcaaaccggtagaaccgctggtcaacgtcatactgcacagacgcgtcggctgccacgtagcggcatgtgcgccttcaaccagctgaatgtgcaggctcgttaatgccggaaacgtgttttccccatccggcaccagagcaaattgcagcgtcagattgggcagcaattcttcaagcaacggttgcggcagctgagggttcacgggcaacacccgcgccccgcattgcagtaacgccagccaggcgagcagcgtttgcggcgtattccacgcccgcaacatcacgccgctgccctcaaccaccccctgcaccgcaaatccggaggctaattcatcgacgcgagcacaaagctcgcgccagttgagttgctcgtcattaagacgtaaggcgatggtttctccccgcacttgccgccagtgacgccacggccagtcagagaagatcataacaaccgctccagtgcatcaacttccacgacaggcagcgtgctacccggccagcgacgtacctgctgcgcctgcatcagatccagcgtgtccagccctggaatggtgtccggcgttaaccaggcggcaatccgcgccagttgcgttaagcctaagctgctttcaatggaagaactgatcaccgccgtcagccccagcgcgtgcgccgcctgtacctgctcgcgtactttttccagactgcccgtgagcgtgggtttgataactaccgcgcgcacgccctcttcagccacaaaggcaaaatccggctcgcgcaggctttcatcccaggcaatggcaatgccggtttcacgggcaaacgctcggctatcatcgcgggttttgcacggctcttcgagaaacgcgatgcggtcgcgataatccgggttaacgtatttggcaaactgctgacctttcagcggtgtccaggcgcgatttgcgtcaagacgcaaatgcagatccggaattgcctccagcaacagattcaccaccatgccgtcgcgcaccgcttcgtacaatcccactttgaccttcgccactttctcgcctggcatatctgcaagtttgaggatcagatcgtccggatcgccattacacagcggtgccgcacggtagttggctgcttgcggcaacgtatctgtcagttctgccaatgcacagcttacgccaaaggccacggaaggcatctgcggtagctcgcaatcgcctgccagccagttatttacccaggcaagcagcacactttgcgcctcttcccaggtttcctgactgaagcccggcagtggggagatctccccccacccttcgcgctcgccttcacgcaggcaaacatacagcccgtcgcgggtttttaaccgcctgtcgcgcagaaccacccccgcgtccatggggatctgccagcggtatacctgcgcgctacgcattacggattccgtttgaatttgctgaagtcaggctgacgtttctggttgaaggcgttgcgaccttcctgaccttcttccgtcatgtagaacagcatggtggcgttgcccgccagctcctgcagccccgcctgcccgtcacagtcggcgttcagtgcagctttcaggcagcgcagcgccatcgggctgttttgcagcatttcgcggcaccaacggacggtttctttttccagatccgccagcggtaccacggtgttcacaaggcccatatccagcgcctgttttgcgtcgtactgacggcacaggaaccagatttcacgcgcttttttctgcccgacgatgcgagccatgtaggaagcgccccagccgccgtcgaaggaaccgactttcgggccagtctgaccgaagatggcattatctgccgcgatagtcaggtcgcacatcatgtgcagaacgtgaccgccgccgatggagtagccagccaccatcgcgacaaccggtttcggacaggtacggatctgacgctggaagtccagcacattcaggtgatgtacgccggaatcatctttatagccgccgtaatcaccacgcactttctggtcaccaccggagcagaacgctttatcgcctgcaccagtcagaatgatcacgccgatgttgtcgtcataacgcgcatctgccagcgcctggatcatctcttttaccgtcagaggacggaaggcattgcgcacctgcggacgattaatggtgatttttgcgataccgtcggtggatttttcataacgaatgtcctcgaaaccttcggagcagtcgtgccattcaaccggtgcgtaaagcattgcttcatcaggataaatcatattgtgtcctttagtcagaaacgcaagatctgcgccagacttgcgattacgccagcgggattttcccgatgcgcgttatgtccggcgcgaggaatgacatggcagtcggcagccagttccgccgccagggcgcggaatttgctgtcacgttcaccacataaataataaaacgcaaatgtgcgggcgctaaggttagcacgtaaatcaggctggacggcgagagaagtcgcctccagcatggcggcaagcgttgcgccattattgttgctgcgcagcgccaccagctcccggcgttgatcgtcattgagactggcaaaaacaggctgttgataccagtcggcaaataccgccgttaacggttctgtgagaaaacgctgcacccattggcgatcggaacgctgacgttccgcacgttgttcagcattttgcagccccggatgcccgccttcgacaataaccccacaaagccccgccagcccctggcaagccgccatcatcgccacccgtccaccaaggctgtaccccaccagccagaagtcaaggatgttgtaactaaccaaggttttacgcagtaagtcggtgacatcatcaaatccatcgacgctaatcgccgcgctaccaccgtgacctgggagatcaacatacaaccgactgtagtcggcaaacgcctcgcccacttcttgccattcgtggcaatcgccggaaaaaccgtgcaaaaacaccagccagggtaaacctggttttccgtgttttgcctgcgcgtgcaggatcataaatggcttacctgcgccagaagttgctggagcgtttgcgcaccatcggtgtcgttaaccaccatttcaatcaccgtggtggttggcgtgcgccaggcgtcggcaaatgccgtttcaagttcctgccagttttgcggacgatgatatttcagctcgaacatcgcggcggcgtgctcaaaatggacgttttgcggcatcagatagaaacgctcacgctcgctttgcggcgttggcaacaggctgaaaatttgcccgccgttgttgttcaccacaattaataccagcggcgcagaaacctgacgcaataacgccagcgcgttgagatcgtaaagtgcggagagatcgcccacaatcgccagcgtcggtttgccgcttgcccgctgaacgccggcggcggtgctaagcagcccgtcgataccgctggccccacggttgctgtacaccgggtaacctgccggaagttggctaagcgcatcaatcagacgtaccaccaggctgttaccaacaaacaattgcccctgttcaggcagatagtcgcagatgcgatgcgccagttgcgcttcgccaaacgcatcacggcgggcaataaccgcctgcattgcctgttccgccaggcgcgggatttcaacgcaccagggctggcgtttttctgccggatgcagctccagccagtcggcaatattggcaattaagcgacgtccgcgatggtgtgccggatcaagtcgcccttcaatgtcatcaacaatccagtactcttctggttcacagcttgcctgccattgcaggagccgtttccccgtcaggctgcttcccagttgcaccacaatttgcgcctgctgcagctcgctggtcgctttggcattgcctaaccaaagatcggcacacggcagcggctgcccggtttgactcagcacatcgccaatcagcggccagccaagagtttgcgcccacagggcaacttttttgccctcttccgcactcatgcgcccggcaaccaccacgccgcgcttttgtcgccagaagaaccagtcgcgctgtttttcactttccagacgaggcgcttcacgcagccacggtttgtcttcctgccaccagtcacccagacgctgttgccagctaagcccggtatcgtccatttcgccatacagcggttcagcaaacgggcagttgatatggactccccccgcatgaagcgtaccgagagcgtggtcgatggtagaaaccagccaacgtgcggggatatcctgggtcgggcgcggcaaactaatactgtgcgtggggtgagaggcgaacattcccggctggcgaattgcctgattcgcgccgcagtcaattagctccggcgggcgatcggcggttaagagaatcagtttttctccggttaacccggcttcaatcagtgccggatagagatttgccaccgccgtgccggaggtcacaatcaccgccaccggctgcttgctgactttcgccagccccagcgccagatgccccaacccacgctcatcgaaatgggtgtggtgaatgaatgcggaattctccgccgccgctaacgttaacggtgtagaacggctgcctggggcgatacagatgtgtctgacgccgtgacgcgttaatgcttccagaatgaccgccgcccagcgtcggttaaatgcgcttacactcatgagtttgtccggtatcaatattgcggctaagtataaggagctacaaaaatagattattgatatgaatcggtaatgatgcgactcattattattccatttgtaataaagtacgcagccctgccgctttgttgtcgatttcctgccactcttgctcggggtcggaaccacggacaatgcccgcgccagcatataatcgcacgacattgccgctaatttttgcactgcgcagggaaacgcagaattcgctttgttgtaaactgagatagcccgcagaaccggcgtaccattctcgggtgaacggttcgtgacgggcgataaactgtcgcgccagatcgcgcggtaagccagcaactgctgccgttggctgcaactgatgtaaacagatcacatcatccgctttgttgagactagtccagatacagcggcgaagatgctgcactttacgcagacgcagtacctgcggcggtaaaacatccagcgtctgggtatcggcctgtaatcgttgacagatatcttccaccaccagcatgttctcgcgctggtttttatcatccgccatcagccactctcctaactgctgcgcctgcttatcatcaggattatttgctactgttcccgccagcgcttcagtacgcagcgctttgtcacgccgccgccataaccgttccggactagagccaagaaaagcattttcgccatcaaaggccatgtaaaaatggtagcaattcagattcagtcgacgactggcagccatcatcgccgccgcgttgaccggacttgcgaaatgcaggtcagttgcccgagcgagcaccactttgtcgagctcaccttcggcgatggttttcgttgccagttcgattaattgcgtccagcccgttttgtccggccagtgttgttctcgcgtggtggttaaatgtaacccaggcaagggcttgatactcaccagtgtggcgataaattcttttgcctgaatcgcatcgtgctgaagggagctttcgctgaatagcgtcagccgcagcgtggctttaccgccacagcgtcgccattccaggcggggtaaaagtaaattgccctggctcgggtcaaaagcattcagcccccaaatgcgtaagtcggcgtgttccgggtgctggcgaagaaaacgttgtgcctggtccaagctcgtaaaacgggtaatcgcgcccaggacgacagcttcttcatcaccattacgttgttgccagtagaattgcgggtatgtttgctgactggccagccagctcaaggcatcaaaagcgtctttgagagggaaaggaatatcgataacccgaatgccgggtgtcgccggaatctcttggctcaaatggcgcagtagattttccagcgccgtagtaagactttgcacgcggacctctccctgttaaaagcctcacattatacggggtactacaaaaaaaatgcagtaccccggtgtagggaggttttaacggcgtgccagcaacagtcctagtaccagcccaacggccgcgcccacaccaattccttgccagggtttttcgtggacgtagtcatcagcacgataaactgcctgcttcgcccgatagtaataactgtcactagcctggctaacccgttttttcacatcatccagcgctttttctgcacgcgctttcagctcaacatatttctgatcggcgggatcgccagaggagcggagcacctcttccagtgtttcactaagcagcgtcaggtcgtcatcgatacgtgtatcaccaaactgattagacattctcgttctccatttgcgtaaaacctgtcactaactatagacaagggttgttgattacgcctgaattacctcgcgtgccatcccaatgtgtgggataccatcttcttcatagacctccgtcacagggataaaaccgaaactctggtagaagttttgcagatgcgcctgcgccccgaggtaaacaggcttatcaggccagtgatgcgtacatgtttcgagtgttttactcatcagctgctgccccactttttcgccacgcaacgcttcactgacaatcacccgacctataacgaccggctcaagatcatcatcacttttcagaatcctcgcatacgccaccagttcatcatttttccaaccgagaatatggcgattatcccccgtcaaatcatcaccatcgatatcctgataagggcaattctgctcgacaacaaacaccgcgcaacgcagttgtaataaggcataaagctgggaaacgcttaattcagagtgatgcagatcttgccattcaatcataatgctctccttttagatgtatgccttatactagccggaatattttttgaaacgtgatgaactcatggaattaatttttttaggtactagtgccggtgtgccaacccgcacgcgcaatgtcacggcaatattgcttaacctgcaacatccgacccagagcggactttggttgtttgactgcggtgaaggcacccagcatcagctactgcataccgcctttaaccctggaaaactggacaagatttttatcagtcaccttcatggcgatcatctttttggtttacccggcttgctgtgcagtcgttctatgagtggcattatccaacccttaacgatttatggtccgcaaggtatccgtgaatttgtggaaaccgcgctgcggattagcggcagttggaccgattatccgctggaaattgtcgaaattggcgctggcgaaattctcgatgatggcctgcgcaaagtaaccgcttatccgctggaacacccactggaatgttatggctatcgtattgaagaacatgataaaccgggtgcattaaatgcccaggcattaaaagctgctggcgtgccgcctggcccactgtttcaggaattaaaagcgggcaaaacaatcacgctggaagatggaaggcagattaacggcgcagattacttagctgctccagtgccaggtaaagcgctcgctattttcggcgataccggcccctgcgatgccgcacttgacctggctaaaggtgtcgatgtcatggtgcacgaagcgacgctggatataaccatggaagccaaagccaatagtcgcggccatagctctacacgccaggctgcgacactagcccgtgaggctggagtcggcaagctaatcattacccacgtcagcagccgctatgatgacaaaggttgtcagcacctgttacgtgaatgcaggagtattttcccggcgactgaactggcgaatgatttcaccgtgtttaacgtttaactctgcttattattaaaaacagggcgaaacttgccctgttatcgcaacccgcgctacatatatccacccacacaggcatattgagcgatttttgatatttattcatctccttacgcactatattcagagcaataagttgcctcttttcatcttgattcagcacaacctttgcaactaaaaggagcccatgatggttacagttgtcagcaattattgtcaattatctcaaacgcaactcagtcagacatttgcagaaaaatttactgtgaccgaggaattactgcagtctttaaaaaaaacagcgttatccggagatgaagaaagcattgagttactgcataatattgcgttaggttatgataaatttgggaaagaagctgaagatattctttaccatattgttagaaccccaacaaatgagaccctaagcattatccgacttatcaaaaatgcttgtttaaaattatataatctggcacatatcgcaaccaactcccccctcaaaagtcatgatagtgatgatctcctgttcaaaaaactattctcccctagcaaattaatgacaattatcggtgatgaaattcctcttatatctgaaaaacagagccttagtaaggtgcttttaaatgatgagaataatgaactgagtgatggtacaaacttctgggataaaaatcgtcaattaaccacagatgaaatagcttgctatcttcagaagatcgccgctaatgcaaaaaatactcaagtcaattatcctactggtctctacgtcccctactccaccagaactcacctggaagacgctctcaatgaaaatattaagagcgatccaagttggccgaatgaagtccagttattccccataaatactggcggacactggatattagttagcctacagaaaatagtaaataaaaaaaataataaactacaaataaaatgcgtcatattcaacagtttgcgtgcactaggctatgataaagaaaatagtcttaagcgtgtcattaatagttttaattctgaactcatgggagaaatgagcaataataatataaaagttcatttaaatgaaccagagataatatttttacatgccgatcttcagcaatacttaagccaaagttgcggtgcatttgtgtgcatggcagcccaggaagtgattgaacaaagggaaagcaattctgacagcgccccctatacgttattaaaaaaccatgctgacagatttaaaaaatatagtgcagaagagcagtacgaaattgattttcaacatcgactggcaaacagaaattgttatttagataaatatggcgatgcaaatatcaatcattattatagaaacttagaaataaaacacagtcaacccaaaaatagagcatccggcaaaagagtgagttaacatcattgttaattaattcgaccagtcagcaaatatgctgactggtcgaacatagtttgctaaacagtcatcactgactgatgtcagtcacaccatccgccagttcaatcaggcgaataaattccgccctgtaaccctgtggatcttccccttttgcctgctgagcccactgtttgatctgctgccaggaggtattgttcaggtattcagaaccgcgtaacttttgcccatatgcagctactgctgcgcgaaaacgcatatcttcagagggcgcgtttattgttggccccagcgggaattcaactaactgactttcttttccctgcgggtatttccagcgaatttttaaccaggccagttctttcgttttgtcgcttttcgctaatttgttatccggggcatagcgtaacttatcaatacttgctttttgcccgttcagcgttaattcgaataacaacgttatatgtttgcctgcgcctatatcccctgcatcaacgttgtcgttattaaaatgttccacccgaagttggcgcttttcataaccaatctgacggtattccgttacccacgcggggttaaactcaatttgcgctttgacatcttttgctacggtaatcaacatctgccgcatttcactattcaatactttctgcgcttcagagagggtatcaatgtagctgtagttgccgttaccaacatcggcaattcgcaccatcattgcctcgttgtaattgctattccccacgccaaacgtgctcagagtaacaccagactcccgctgttttttgaccatactttcaatgctttttggatcgtcaatgccaacgttaaagtcaccgtcagtggctaataaaatgcgattgatgccgcccttaataaaccccttcgtcgcctgctgataagccagttccagcccggcaccgccattggtactgccttcggcatccaggctatcaattgcggcattaatttccgccttatgactcccggagatagaaggcaatgcaatacgggagtcgccagcgtaggtcacgatggcaatgttatcctgctcacgaagttctttgaccaataatttcaagctagactggataagtggcaaacgttcatcagaaatcatactaccagaagtgtcgataagaaagaccagattagaagctggtaactcttcacttttgcgatctttcgccaggatatcaactttcagcaatgttcgctgttcattccatggtgcaggtgccaattcgtagcgcatagcgaaaggtattggcttagaggccggaatagattgtttgtctttgatatcccaatcagacgggaaataattgactatctcctccacccgcacagcgtctggcggaggtaacagcccttgattgaggaaacgccttacattcgcataactgccagtgtcaacgtcaagactaaacgtcgccaacggattttgcgctacctgcttaaccggattatcatcgaactgctggtagcgagcggttcctggatttgcgatatgtgtagcttttgctttagccgctcttgcaaatgttggcgcttcctgcaatcgcccctgtaaagcctgtttgtcactatattgttgcacttcttgctgggccaaggctttcgcggcggcggcgctttgctcagcctcttttattgcagcttgctgcgcggcaagcacttgctgctctgtgggagtactgggttgttgttgctgactttccttattctcaggttgcggcccacatccactcaaaatcaaactactcataagcaacatgattatatttttatttcgcatataaaatccttttaaataaactcaggcaccagacataaaatatactctttgtataatcctgctaatcttaataaaatacaatatcgaaacccatagcaaataatgattcaacaacgcaacccattaataatttgcatatgaaaaaaataatctttgcttttattatattatttgtgtttttactccctatgattattttttaccaaccctgggtcaatgcattaccgagtacgccccgacacgcaagtcctgagcaattagaaaaaacagttcgttatcttacacaaactgtgcatccacgtagtgccgacaatattgataatctgaataggtccgcagaatatataaaagaggtctttgtcagtagcggtgccagagttaccagccaggacgtccccattacgggtggcccctacaaaaacattgttgctgattatggtcctgccgatggaccgctgattattattggtgcgcattatgactctgccagcagttatgaaaacgatcaattgacctatacgccgggcgcggatgataacgccagcggtgtggcaggattactcgaactggcacgtttgttacatcagcaagtaccgaaaacaggcgtgcagctggtcgcctatgcgagcgaagaaccgcccttctttcgtagcgatgaaatggggagcgcggtgcatgcagctagccttgagcgtccagtgaaattaatgatagcactggagatgattggctattacgactctgcgcctggaagccagaattacccttacccggcaatgtcctggctttatcccgatcggggagactttattgccgtggtcggcagaatacaggatatcaacgccgttcgtcaggtaaaagcggcattgttgagttctcaggatttatctgtttattctatgaataccccagggtttattcccggtattgatttctctgaccacctgaattattggcaacacgatattcccgccataatgattactgacaccgctttttatcgtaataaacaataccacttgcccggtgataccgcagacagattgaattatcagaaaatggctcaggtagtggatggtgttataactttgttatacaacagtaaataataaaaatttctcgaggcgggtccagaaaaagcgacatgcacattttattttccctcatctgttttaagatgcgaaacatgaaattcaacggaggaaaaataaatgggaatgattggctattttgcagaaattgacagtgaaaagattaaccaactgcttgagtctactgaaaaacctttgatggataatatacatgacacgcttagtggattacgccgactggatattgataaacgctgggattttttacactttgggctgacaggcacctctgcttttgatcccgcgaagaatgatccgctgagtcgtgccgtgcttggtgaacacagcctcgaagatggcatagatggcttccttggattgacctggaatcaggagttagccgcgacaatcgaccgactggaaagtctggatcgaaatgaactgcgtaaacagttttccattaagcgactcaatgaaatggagatttatccgggagtgacctttagtgaagagttagaggggcaactctttgccagcatcatgcttgatatggaaaagctgattagcgcgtatcgacgtatgctgcgacaagggaatcatgcgctgacggttattgttgggtgatatagcttgatgcctgggggagaaagacccattagttaagatttacgccaggatcatcttgaaaaaatctttaaccatggtccggtttttatccccttgtataaatattactaaatgcttgcttagtcgcattgttaaatgcaataccgtatattcggtatgtaacagcgatatcctctgtgctggcaacgatctgtcatgcttgatgaaaacggaattgaacctgtcattaccaggtagataaaaagcctgttcaattttgggattattttttataactcgtgtctgttatggcgacacgggaaaacatcaatattgtccttcacaaattgcagtaatatagaatcaacctctcttgcaagttggtcacaatgtattataagcattttgaatatgtcatcctctgtaatctcgtgaaaattttcggccttgtcttttagctcatcatatcggattcttgcagtaaccattttttgggcgagttctaataaccccaaagcttgcaattgctggtgagtatgatcactttcaaaaaatatcccacactccattccttcccaaccaacatattcatgccattcataaaccagcataaatgtttgtaaaactggcggtaataattggatatctgcaaaaccaaaccaaaacttacgcttgagatcccactcatattcaatcgccaatgctatattgtttaaggcatctccggcatccttatttttacgcaaaatcaattccgtcagtgtatagcgttgttcatcaatacgccgaagagcttctgcaatatcatagtttgtagccaacaaaacattctctgcttcctgatgagtgacgtctgcttttgccgtcaatatattgatttggtcaatatgaaacaacttgatggcttcatcaacatcaccgccagtcctctctaacaaacgtctggcaacctggataccgacaggtacgttcttccgaagtttacgaatttcacttaaccattccatgtcaaacccctttaaatatttatgatattaaatataacaacgtctggataacgacccggcctgactgaatatctcacgttttcctgcttaacattcatgttatgatgctcttgaaactaataatacgtatggaattgtcactatttatctgctaatgaatagtaacaatgtcattcgtttgatgaatatattatttcagggaataattatgacacctttagaacgcattacccaacttgttaatatcaatggtgatgttaataatcctgatactcctcgtccattgttatctcttgaggatttttttattgacaataatatccatggtagtatatgttgcaatgtgattccagaacaatctccgcaagctatctatcaccattttctgaaaatacgtgagcgtaacaatgttagtgatgttttggtagaaattacgatgttcgatgacccagactggccctttagtgaaagtattttagttatcaccactgctagtccagaagaagttcagagctggtttgtagaagaaattgcccctgatgagtgctgggaaggatggagtgaagatacggagcatggatgggttgaagtccctgtgggtatgcatccggttacttgttggtgggattaaaacatttatataaacagataagcggatgtttacataaatttttatgtgaaggaacatgatgaaacttattcctcgcagtagtgatattagtcctggcattgatggaatttgcccggggccttttcctccgaacggatttaccgtacttacagatgcagcatatggtaacggagactgtttcggtttgtactggcctattggtcaggagcataaactacctatagtgtgcgaaacgtaccatgacgaatggcgaatcgtacctgccttttccagcattaagaagttcgaagaatggctggaagtgaatgatgatgatccccatgaaaatggcatcagcatcgaagatcaagactttgcagcaaatctcttccgtgttgctcggaaatgtcttagtacgggaaggcttgatgacgcactgccactgttacagcgagcaacagaacaattgcctgaagtcagcgaatattggttagcactggcaatccagtatcgccgatgtaaaaaaacagaagctgcagcacaggctgcgcttaatgcttatcttggcaattgggcatttggtgttcctgacaataaagtcattcatttgctgagtcaggccgcagatgtcccgaatttccaggatgatcctgtgattcagtgcattaaagaacaaggattagatcttagctttggaggaacaaaggaaaataataattaccccttgatgcagatgtgtgttgatacttattttgcgcagagaaaaccgcttcaggcattaaccctgttacataattatgcctggataatgtccagtgaaacgactgcatttcaggaacgctatgattttaatatcgatgaatggcgggcaaaattcaggcagttatgtttagagtattttggcgatagtcgtacacagttcacttaacgctctgcgtctatctactatcccttctttttcagaaaaaccgccgagcatgtcggcggctttctgacttacaaagtaacagattacatcagcggcattgccaaacgcacaatgctaatcagcggttgtggccatacacccagcaccagtaccaacagtgcagagatcagcacaacgataccgcccgcgctgtactgccagttacttggtgcatcgcgacccggttgttccggggcgtgaagatacaggctcaccgccacgcgcaggtagtagtagaggccgattgcgctaccgacaaccacggcacccaccagccaccacaagtgtgcctggacaccgaccgccagcacgtagaacttaccgataaagcccagcgtcatcgggataccggccagagacagcatcatcaccgtcatcactgccgcgaggatcggacgatgccagaacagaccgcggtaagagaacagggaatcagcatccgggccacgatacgggctggacatcaggctgaccacgccgaacgcgccgaggctgctgaacagataaccggccaggtaaacccctaccgcttccatgctcatctcgccggtttgcagcgcaatcagcgctaccagcagatagccgaggtgagagatagaactgtaaccgagcagacgtttgatattggtctggctcagcgccatcaggttaccgaagatgatggaggcaaaggcgataatcgccagcaccacgcgaatcgcttcgctgtcacccaccggtgcgtagaggaacagacgcatcaccacaccgaagatagcgattttgctcgccgtcgccaggaaagtggaaaccggcgcaggcgcgccctggtatacgtctggcgtccacaggtggaacggcaccagagagagtttgaagccgaggccaacaatcatcaggccgaaacctgccagcaacagcggctcgttgagcataccgtcgccaaggtttttacccaacgcgacaaagctcaggtcgccagactgcgcatacaccagcgccataccaaacagcaggaaagaagacgctgcggcagaaaggatggtgtatttgatactggcttccagactacgtttctggcggaaagcgtaaccgaccaggccaaacagcggcaaagagatcagttcgataccgaggaacagagacgccagatggttggcattcgccagcaggatcccgcccagcgcggcaattaacaccaacaggtagaactcatccttgttgtcgttatagccttcaagccacgggtaggcgaaagtacaggtggcgaggctcgccaacaataccagcccggtgtaaagcatggcgaaaccatcaacgcgcatcagcggcgtaacgtccatagcgcccgcctggccaacaaaccagagcgaaaccagcgccgcgttaagcccaataaccgagagcgtagcgttgaggaaatgattgcgtcgccacgcaatggagagcatcacaaccaccaccgtcaagccgacgatcagcaacggtagcagtgcgatcaggttttgtggagttattgtcatggcgatttacggccttgtagtagtaacggaattaacaaaccactgctggatattgccaatcgcggagtggctggtatccagaatcggctgcggatagaagcccagcagtaccagcagcaccaccagcaacaggatcataaacagctcacgcaggctcatccctggcagttcctggctggcaatctggcttttcgctttaccgaagtaagcgcgatgtaacatcgccaggctataaacagatgcaaagaccagcccaaaggtagagataacggtaatcaccggtacaacctggaagctgccgaacagaatcataaattcgccgacgaagttaccggtgccaggcatcccaagcgttgccaccgcaaagaacaggctcagtgctggcagccatttcatcttgctccacagaccgcccatcatgcgcatgtcgcgggtatggatacgttcataaagctgaccacaaagaataaacagacccgccgcgctcaaaccgtgcgcaatcatctggattaccgcgccctggtaggccaactggctgccggtgtagatagcaatcagcacgaagcccatgtgggaaacgctggtgtaggcgatcagacgtttgatatcggtctgggcgaaggccatccacgcaccgtagaagatgccgataacacccagccacatagcaattggcgcgaactctgcgctcgcgttcgggaacagcggcagggagaaacgcagcaaaccgtaagcggcagttttcagcaagatccccgcgaggtcaacggaaccggcggtcggagcctgggagtgcgcatccggcagccagccatgcagcggaaccaccggcattttgactgcgaaggcgatgaagaagcccagcattaacaggtattccacaccactggacattggcgtattcagcagctcttcatagttgaaggtccagacgccggtcgcattgtagtgaacaaaaaccagcgccaggatggcaatcaacatcaccaggccactcgcctgggtgtaaatgaagaacttggttgccgccgtgatacgcgttttaccgtcagaggctttatgcccccacagtgcgatcaggaagtacatcggcaccagcatcatttcccagaagaagaagaacaggaacatgtcgatggcaaggaacacgccgataacgccgcccaggatccacatcaggttgaggtggaagaagccctgatatttttcgatctctttccagctacatagtaccgccagcacaccgagcagaccggtcagcacgaccatcagcaggctcagcccgtcaatggcgagatgaatagagataccaaaacgcgggatccacggcatgtcgaattcagactgccactgcggaattccggcggattgcgtcagactataaccgccctgcaaccacagttgcaggctcagcgccagcgtcaatcccatggtgatcagcgcgatccagcgtggcaccttgacgccaaagcgttcggtctgccagcacaggaagccgccaataaagggaattaatattagccagggtagtaacatggcgatctttattccttgtaaaagtcccgtcaggaccggattttcaacgaattctcacgacagaaaattctcttcggactgggggtagtgtcggatgcaccgcgaaggcggcttatccgacctacgttcttatatgcccaggggcaatcccacaatccttaactcaacgcagtaccatcaacagtgccagcaccacgaccgcaccgatgctcatggatgccacataccagcgcagatagccgttctcacttaacagcagacctttacctgcaaagcgggaaaggacagccgggatgttcatcatactgttcagcggatcgcgtttcagcaaccaggcaatacccaggaacggcttgacgaacactttgtcatacagccagtcaaatccccaggcgttgtaccaccaggtgcccagcagacggcccggcgcactgttggcgatggaggtcaccagagtacgtttacccagccacagccaggctgccagcagaatgccgaccaccgcgaccacgccagaggtaatttccagggtcaacatgctgccgtgcgccagttccgtcgtttgcggaagcacgccctgcagcggcggtacaatcagtgcgccaacgaaggtggaaaggatcagcagcacaatcagcggcaggctgtgagttacccctttcacggcgtgagcgtgaatttgttcttttccgtggaagacgatgaaaatcatacggaaggtgtagaggctggtcataaacgcaccgaccagacctgccaccatcagattgatatgaccattcgccatcgcacccgcgaggatctcatccttactgaagaagcccgcagtgaccagcggtagtgcgctcagtgctgcgccgcccaccaggaagcagagataaaccagcggaatagatttacgcagaccgcccatcttgaagatgttctgttcgtgatggcaggccagaatgacggaaccggatgccaggaacagcagcgctttaaagaacgcgtgggtcatcaagtggaaaatcgccgcatcccatgcctgcacgccaagcgcgaggaacatgtagccaatctggctcatggtagagtaagcgagaacacgtttgatgtcggtctgtaccagcgcggcaaaaccggccagcagcagcgtaaccgccccgacaatacccaccagatgcagaacttccggcgtcatcaggaacaggccgtgggtacgggcgatcaggtagacacccgcggttaccatggttgcggcgtggatcagcgcggagacaggcgtcgggcccgccatcgcgtcggcaagccatgtctgcaacggcaactgcgcagatttaccgaccgcaccgcccagcagcatcagcgtcgcccacatcagcatgttattgccgtcagcaaagtgcgctggtgccagttccaccatttcgcggaagttcagggtgcccagttcgttgtaaagaatgaacagtgcgaaagcgaggaacacgtcacccacacgggtcacgacgaacgctttcattgccgctgcgccattcttcggatcggtgtaatagaacccgatcagcagataggagcacaggcccacgccttcccagccgaggtacatcagcagcaggttgtcggcaagcaccagaaccaccatgctggcgatgaacaggttggtgtaagcgaagaagcgagagtagccctcttcaccgcgcatataccaggaggcgtacatgtgaataaggaaacccacaccagtgaccacgctgagcatggtcaggctcaggccgtccagcaccaggttaaaaccgatgttaaagtcgcctacgctcatccacgtccacagcggctggctgtatgtctgctcgccgttagcgaagaaatcaacgccgataaaggcggttaccagcgccgccaggcccacagagcctacgccgacgatcgcgctgacgttttcagaccagcgcccacgggagaatgccagcaggacgaagccaatcaatggcaaaataatggttaaggcaagcatgttcatccgcgcatctcacttacactatcgatgttcaggttctggcgacgacggtgaagttgcagcagcagcgcaaggccgatactcgcttctgccgccgcgaggctgatggcgagaatgtacatcacctgaccgtcggtctggccccagtagcttccggcgaccacgaaggccagcgcggaggcgttaatcatgatttccagaccaatcaacataaacagcagattgcgacggataaccagaccggttaagccaagaacgaataagattgccgcgaggatcagtccatgttgtaaggggatcatgcgtgctcctccgtttttcttttcgcgctgtcgtctttacgattgctcagcacttcacccgcacgctcttcacgaccgacgtggaaggccacaaccagacctgcgagcagcagcatagaagccagttccaccgccagtacgtaaggcccgaacagcgtaatacccactgctttagcactgattggcgtaccgtcgataccctgatcgttaacaccgaggatggcgtaaacaatcaccaccagcatgatggcgctcaaaattgccggaccaatccacacctgcggtttcagccactggcgttcctgttcgatttcactaccgcccaggttgagcatcatcaccacgaacacgaacagcaccataatggcacccgcgtagacgataatttccagcgcaccggcgaagtaagcgcccagactgaagaacaccccggaaatcgccagcaggctaataatcaggtacagcagtgcgtgtaccggattggtatgggtgatcactcgcaaggtcgcaagtatggctatcaggccacagatataaaaagcgaactccattgcccctctccttacggtaacaggctcttgacgtcgataggcttggcttcgttctctgcttcgcccttatctttgccgtcgattgccatacctgccatccggtagaagttatattccgggtatttgcccggaccggagatcagcagatcctctttctcgtaaaccagatcctggcgcttgtattcccccatttcgaaatccggggttaactgaatcgccgtggtcggacaggcttcttcgcacagaccacagaaaatgcagcgactgaagttgatgcggaaaaattccgggtaccagcgaccgtctttggtttctgctttttgcaggctgatacagccgaccgggcaggctaccgcgcagaggttacaggctacgcaacgctcttcgccgtccgggtcgcgggtcagaacgatacgaccacgataacggggcggcagatagaccggctcttccgggtacattcgcgtttcgcgtttggcgaacgcgtgcaggccgatcatccagatactacgaacctgggtgccgaaacctactaacaattcttttaaggtcatggtcttattgccccttattgcgcctgccagagaatgacagccgccgttaccagcaagttgatcagcgtcagcggcaggcagattttccagccgaaggacattacctggtcataacgcggacgcggtaagctcgcacgaatcaaaatgaacatcatcataaagaacgcggttttcagcgcgaaccagatgaatggcggtaacaacgggccttgccagccaccgaagaacagcgtcaccatcaatgcagagatggtcacaatcccgatgtactcacccacgaagaacagaccgaacttcataccggaatattcaatgtggtaaccatccgccagttcctgctcggcttccggctggtcaaacgggtgacggtgacataccgccacgcccgcgatggcaaaggtaataaaaccaaagaattgcgggataacgttccacacatgcgcctggctgttgacgatgtcggtcatgttgaaactaccggcctgcgccaccacgcccatcaaggaaagcccgaggaacacttcgtagctcagggtctgcgcagaagcacgcatcgcacccagcaagctgtatttgttgttactactccagcccgcaaacagcaccgcgtaaaccgccagacctgccatcatcaggaagaacaaaatcccgatgttcaggtcggcaaccacccaacccggactgactggcacaatcgcaaaggccagcagcaggctggtaaaggcaatcatcggtgccagggtaaagatgacgcgatcgctgaatttcgggatccagtcttctttaaagaacattttgatcatgtccgcaaccagctggaggctaccgccccagccaacacggttaggtccgtaacggttctggaacagacccagcaggcgacgttcgccaaagctcatgaatgccccgcaggtgacaaccaccagcaggatcaccaccgctttgaggatggtcagcaggatctcaatcagttccggacttatccaactcattgttgtgcctccttgagatcctcaagatgcgcgccagccagcaccggagcaatgccggacatacccatcggcaagcccacctgccctgccgtcagtccttcggcgatttcaaccggcagcgtgaccgtgttgccatcgtaactaaaggagacgcgtgtacctgcgttcacacccaacttcgcggcatccgctgggttgagtttgatgtacggctgcggcatacggctctggaagaccggagcacgctgactcaattcatcgctgccaaacaggtggtaatacggcgcgatacgccatttcccgtcctgcggctggaagcgtgccggtacgctggtgaagtaatccagaccattttcgctggtttcaaacagacgcacgcccggatcgccaaagcgcagtttgccgcccacttcgtcctggaatttgttccacgcctgcggggagttccagcccggcgcccaggcaaacggcacttggctacggtgcgcagtcggctggttgttaccttccatgctgaaggtgaacatggtgtcaatatcctgcggctgacgcggctcatgaacgctgatattggcgcgcatggcggtacgaccgctgtaacggtgcggttcacgggccagtttctgcccacgaatacggaatgtcgcatccggcgcagcatctttgatacctgccagttccgggattttcgccacaacagcgtcaatcacatggtcgagctgcgtccagtccacttcacggctcagcagggtgctgtgcaggctgtgtaaccagcgccagctttccagcatgacagttttgctgtcgtaataagcaggatcgtaaacctggaagaaacgttgggcgcggccttcgttgttgatcaccgtaccgtcgctttcagcaaagctggcagcagaaagtaccagatgggcgttttccataatcgctgtgcgttgatgatcaaccaccatcaccagcggtgctttagccagcgcagcattcacgcggatagcagaagcgtgacgatgcagatcgttttccaacaccaccaccgcgtcggcgcgtccggtttccagttcggttaacgcttcttcaaggctaccgccacccataatgcccagccccatgctgttgacggaacgggcaatcatggtgataccgacgtcagcgccgcgacctttcagggctttcgcgacgttagccgccgcctgaatcacctctaagctaccggcgttcgtcccggagataatcaacggtttcttcgcacctgccagtgcctgcacgatgacgtcgattttgctttgcagctcaggttcgataccgtcaaccgctggtgcagagttatccagcgcatgggcgatggcaaaacctaaacgcgcctgatcttcaaccggtgcgcggtaagtccacgccgcgatatcatccagacgggtgtcatcaacgttggtaacaaacagcggatgcttcgcacgttgaccgatgttgaggattgccgcaatctgccagtcagccactttctgtgctgccgccatttcgcgcgctttacctttcacagcctgacgcactgccagcgcgacgcgcgcgccggtctgggtaacgtcttcgcccagcaccagtaccgcatcgtaagattcgatttcgcgcagagccggagtataaatgccgccttcacgcagcactttcagcgccagttgcagacgttcctgctcaccgtgagcgataccggtgtagaagttttcttcgcccaccagttcacgcagcgcaaagttgctttccacgctggcacgcggagaaccaataccgatcactttcttgctctgacgcagaatatctgccgcgccctgcattgcctgttcggcgttgagggtaatgaaatcatcgccacgacgctgtactggctgacgcggacgatccttcaggttgacgtaaccgtaaccgaaacgaccacggtcgcagaggaagtagtggtttaccgtaccgttgtaacggttttcgatacgacgcagttcgccgtaacgttcaccggggctgatgttacagccgatggaacattgctggcagatgctcggcgcaaactgcatatcccatttacggttgtaacgctcggagtgcgttttgtcggtaaatacgccggtcgggcaaatttcgaccaggttaccggaaaattcgctttccagcgtgccgtcttccgggcgaccgaagtagacgttgtcgtgcgcaccgtaaacgcccagatctgtaccgtcagcgtaatctttgtagtaacgcacacagcggtagcaggcgatgcagcggttcatttcgtgagagatgaatggccccaaatcctgattacggtgggtacgtttggtgaaacggtagcgacggaagctgtgtccggtcatcacaatcatatcctgaagatggcagttaccgccctcttcacataccggacagtcgtgcgggtggttggtcatcaaccactcgaccacgctttcacggaactgtttcgcttcttcgtcgtcaatggaaataaaggtgccatcggaagccggtgtcatacaggacatcaccaggcgaccacgcgtgtcttccgcgttttggtattgcttcaccgcacactggcggcaagcaccgacacttcccagcgccggatgccagcaaaagtaaggaatatcaaggcccagagacagacaagcttccagcaggttgtccgctccgttgacctcgtattctttgccgtctacatgaattgtagccattagcatgcttccagttttctcagtcagagactgagcgttaatcgaaattcggttaccagcgctctttcagcaggttcggctgaatcccattaatcaaatgggtattgctgaacggctgtttgattcccgcctcaaattcttcgcggaaatatttgatggcgctctgtaacggctccactgcaccaggtgcgtgggcacagaaagttttacccgggcctaagaatcgacacagttgctcaagtgtttcgatatcgcccggctgaccttcaccacgctccagcgcacgcagaattttcacgctccacggcagaccgtcgcggcacggcgtacaccagccgcaggactcacgggcgaaaaactcttccaggttacgcaccaggctcaccatgttgatctcatggtcaaccgccatcgccagcgccgtacccagacggctgcccgctttaccgatactttcgaattccatcggcagatcaaggtgcgcttcggtcaggaagtcagtccccgcgccgcctggctgccaggctttaaatttcagaccatcacgcataccaccggcgtaatcttcgaggatctcgcgtgcggtggtgccgaacggcagttcccacagtcccggatttttcacccgaccggagaagcccatcagcttggtgccagcatctttacttttgctgatgttctgataccactccacgccgttagcgaggatcgccggaacgttacacagggtttcgacgttgttgacacaggtcggtttaccccatgcgccggaggttgccgggaagggtggcttgctgcgtgggttagcacgacgtccttccagggagttgattaacgctgtttcttccccgcagatgtagcgccctgccccggtatggacgaacagttcgaaatcgaaacctgttcccataatgtttttgccaagcagacccgcttcggtggcttcggcaatggcacggcgcagattaactgccgcttcgatatattcgccacgcaggaagatgtagccacggtaagctttcagcgcaaacgcggagatgagcataccttccaccagcaggtgcggcagttgctccatcaacaggcggtctttataggtgcccggctccatttcatcggcattacacagcaggtaacggatgttcatggattcgtctttcggcatcaggctccatttcaggccagtgctgaagcccgcgccgccgcgccctttcagaccagcgtcttttacctgattaacgatttcgtccggagacagcccggtcagcgccttacgcgcgccttcgtaaccgtttttgctgcggtattcgtccagccacactggctgtttgtcatcgcgcagacgccaggtcagcggatgcgtttcgggagtacggataatgtttttcatttataccgctccagcagttcagggatcgcttccggggtcagatgcgcgtgagtgtcctcatcgatcatcatgtttggccctttatcacagttccccaggcagcaagttggcagcagcgtaaagcggccatcaaatgtcgtttgccctggtttgatgttcagctttttctcgagcgccgcctgaataccctgataaccgttgatatgacagaccacgctgtcacaataacggatcacatggcgaccaaccggctggcggaagatctgactgtagaacgttgccacaccttcgacgtcgcttgccggaatacccagcacatcggcgatcgcgtggatcgcaccatccggcacccagccacgctgcttctgaacgattttcagcgcttcaatggacgccgcacgcgggtcttcgtagtggtgcatctcgtgctcgatcgcttcacgctctgccgcactcagctcaaaagcctcggtttgtggttgttgattctcgtgcataattagcggtccacatcactcataacaaaatcgatactgcccagataaacaatcaggtcagacaccaggctgccgcggatcgccgccggaatttgctgcaaatgcgcaaagctcggggtacgaacacgggtgcggtaactcatggtgctgccgtcgctggtcaggtagtaactgttgatccctttggtcgcctcaatcatctggaaagattcattggcaggcatcaccggaccccagctcacttgcaggaagtgggtgatcagggtttcgatatgttgcagcgtgcgctctttcggcggcggcgtggtcagcgggtgatccgctttgaacgggccttccggcatgttgttgaggcactgctcaagaatgcgcagactctggcgcagctcttccactttaagcattacgcgggtgtagcagtcagaaacgccaccacccaccgggatttcaaagtcgaagttttcatagccagaataaggacgcgccttacgcacgtcgaagtcgatcccggtagcacgcaggcccgcgccagtggtgccccactccagcgcctctttcgcgccataggcggcaacgccctgggaacgacctttcagaatggtgttttgcagcgccgctttctcgtaagacgccagacgtttcggcatccagtcgaggaactcacgcagcaggcgatcccagccgcgcggcaggtcgtgcgctacgccgccaatacggaaccacgccgggtgcatacggaaaccagtgattgcttccaccagatcgtaaattttctgacgatcggtaaaggcgaagaacactggcgtcattgcgccgacgtcctgaataaaggtgctgatatacagcaggtgactgttgatgcggaacagttcggagagcataacgcgaatgacgttaacgcgatccggcacggtgatcccggccagtttctctaccgccagcacgtaaggcatttcgttaacgcagccgccgaggtattcgatacggtcagtatacggaatgtagctgtgccaggactggcgttcgcccattttctccgcaccacggtggtggtaaccgatgtctggtacgcagtcgacaatctcttcgccatcgagttgcaaaacgatacggaaagccccgtgcgcgctcgggtggttcggaccgaggttgaggaacatgaagtcctcgttttcggtgccgcgcttcatcccccactcttccggtttgaaggtcagggcttccatctccagatcctgtttggctttggtcagctcaaacgggctgaattcggtagcgcgcgccggataatctttacgcagcgggtgacctttccaggtttgcggcatcatgatgcgtcgcaggttcgggtgaccgtcgaaagtaatgccaaacagatcccaggtttcacgctcataccagttagcgttcgggaacagtttggtgaaggtcggtacgtgcaggtcgttttctgccagcgccaccttcagcatgatgtcgcggttacgatcgatagaaatcagatggtagaaaacggaaaaatccgcggcaggtaacccttcgcggtgtgtgcgcagacgttcgtccatgccgtgtaagtcaaacagcatgacgtaaggtttcggcagtttctttaagaaatcgccaacttccagtaattgttcacgcttgatccacacaacgggaaccccggtgcgagtcgcctgaacagtaaaggcatccggcccaaaacggttgcgcagttcgccaatcaccggatcatcaagatgatcgcgggtctgccaggcgggttcttgcgcggttaagtcggtcatattgttcaccattgcaaatggtccgtggtgactgtcggcgcagtaagcttcgcgaaatagatttaggaataagcgaagaaaaatccctttgccgacaggcgcaaattaaatctcgtcaggtgtacgcaggttagttacggcaatgcgttcaccgcgcttgcgttcgcgctcactttgcatattggcgcgataaacgccctgatcgccaaccacccaggagagcggacgacgttctttgccgatagattcctgcaacagcatcagtgcctgcatgtacgcttcaggacgcggcgggcagcccgggatatacacatcaaccgggatgaatttatcgacgccctgcacaacggaataaatatcgtacataccaccagagttggcacaggcacccatactgataacccattttggttccagcatctggtcatacagacgctgaataaccggtgccattttggtaaagcaggttcctgcaaccaccatcaggtcagcctgacgcgggctagcacgcaatacttctgcgccaaaacgcgccacgtcatgcaccgcggtaaagctagtcaccatctcaacgtaacagcaggaaagaccgaagttatacggccaaatactgtttttacgaccccagttaaccatgtcattgagcttgcccataaacacgtttttgttaacttcttgctccagagggtcggttacgatctcctgcttttgcagggggtaacggtcgttctcaccgttgggatctatgcgggtgagcgtataatccatcttaatgcctcgcggttagcgttgacgattagcgatactgttcgtttccgggttcatacgctcgcggcgactacgcgcgggcgtccagtccagcgcgccaatacgcaccagataaaccagacctgccagtaacacaaaaataaaaattgcagcttccacaaagcctacccagccgctttcgcggatagaggtactccatgcgaacagatacagcgcttcaacgtcgaagataacgaagaacatggccaccagataaaacttggcggacaggcgtaagcgggcggagccgacgctgtcgataccggattcaaacggcacgtttttgctcctcgcgcgtgcgcgaccgcctaaaaaccaaccgcctaccagcatcaggcaacacaggccaatggcaacgataagaaagatagcgaatgcccagtgatgagcgatgacttcagtggatgtactcatactcattgcttactcatcaaaagtagcgccagattcactgctcttcacggcagatggacgccacatcgattcatggggaggaataaaaaaaaccttacaatcactgtagaaattcttttatacagctaattgatgtggttttttactcctttctataaccttttgtcaactttaacaaaagtttcttcacattagtttacataatatcaacaccattagcatttaatgccctttcaccccagatccttgacgactccaggataattagatgttgttgaatcgtgtccgttgtgaagcaatggaaaaaatacgggtctattttgacaggaatttgtgtcgattcctccccccaaaagagagtattttcttgatctgtgacacgcttttgtcattccataacaaaaacgcagcaacaaatttacgtattttttaacatcattgtagcaggtgatttttttcaggcgattatttgtgcgttcgggacgtgaatctctggtggttgaaaaatgaacagttttgtacgttctgcactatgcgatgaaggatttttactaaaaaaaagccgctggggtttaaaacacccccagcggctcgttttttacactattgtctcaggaattatctatcgtccgtcgattactcgatatccctttcaatcaacaaactatcatccccttccggagcagacattgggctgtattgccacggattatggtagctctccatcgcctgatagatcacctgggccagctcattattactggacggatcatagcacagcaaatattcggtatcaggtagcggcggtaagccatctactccactcagcacacgcaggtccgggctcatcatctcaaccggccttgccgtcacgccaagaccggctttcactgccgcacgaacggccggaagcgtgctggcgacataagccagtcgccatggaatatctgctttattaagcgtcgccagcaccatatcgcgaaacgggctaggatcatccagcaatacaagagggatcggctcgcctttttgcaatatgtattccgctgcgcagtaccagtgtgttgggctggtacgcaggttcaatgccttaaacgcactaggacgatgggtggttaccatcaaatccacttcctgggattccagcatttctgccatataggcattacgtttaacgcggacatccagcgctaatttcggataaacgctactcacgcgatttaacaggaaaggtaagatcgtatcggcagattcatcactagcaccgatagttaatacgccctgaagattactgaacattaaactactgcaggcctcatcattaaaacgcaggattttcctggcgtaaccaagaagttgaatgccatgttcagttaacagtttgttgcgaccgtgacgagcgaacagttctttcccaacgagttgttccagacgctgcatttgctgacttacggcggactgagtacgacacacagcggcagctgcggcagcaaaagtgttcagatcggcaacagcaacaaatgttctcagcagatcgaggtcgaggttaattatcggacgatttgcacttatcatatattatcacttactggcggctcatactgagctggttaatgctgtgcacacacaaacaagcaattccatttgtaatgtgcctccctggcagtttcatccggaacccggacgaaagtaaaaatgcatatgagttgcactaaaaaagcgactcacattgttccgttataatgcctgaagtagatcacagaatatatcttcagggatcgcatatctattaagttactcactcttttctatttatgacatgcgcgtgtttgtataaatgtaaatgtgagtccttgttccactctcgtgcagcatcgctggtcatacgcgaacacgtaccaacagcaatggtgaggcggcatcaagagcagggatccgtcatttatccgagcattttaccccaaaaaccttttatttataagggtcattgcgaattatctgatgcaaagttatgttatgttaggcaaagtaatcttctattattaataagcacatcaaaacctttttgaatattaaataataattaattagcatcatcctcattcattaattccgcttaacaatagtttcacaccttgcccccattgcgacacctcggaaatcatcacgcagttaaactctccgtaatgaggaaatatcatcatcgcgtttcattagtgaattcttaaatgaggcattttcacacaattatcttacagataaaaaaaccagacttacaattaagaatcagaacaattcactatataacattgcatgtaaagcatatacacctcattattttgtcattattaagttattaacagcacaatcgagccttcccctctggcaaaatcttattctgcagaccttcaaaacaccgtcctgggggagtacattgttctaagctgacttccacggcagggagtggcgataacagcaaaaaaggtcaagattcatgtcccccattgaaaaatccagcaaattagagaatgtctgttatgacatccgtggtccggtgctgaaagaagcaaaacgcctggaagaagaaggtaacaaggtactgaaactgaacatcggcaacccagccccgttcggttttgacgcgccagatgaaatcctcgttgacgtgatacgcaacctgcctaccgctcaagggtattgcgattccaaaggtctttactccgcgcgtaaagccatcatgcagcactaccaggctcgtggcatgcgtgatgttaccgtggaagatatttacatcggcaatggtgtaagcgagcttatcgttcaggcaatgcaggcattgctgaacagcggggacgaaatgttggttcctgcaccagattacccactctggaccgcggcggttagcctttccagcggtaaagcggtgcattatctttgcgatgaatcctctgactggttcccggacctcgatgatattcgcgctaaaattacgcctcgtacgcgtgggatcgttattatcaacccaaataacccaaccggcgcggtatattccaaagagcttttaatggagattgtggagattgcacgtcagcataatctcattatcttcgccgatgaaatttatgacaaaattctctacgacgacgctgagcatcacagtattgcgccgctggcacctgacctgctgaccattacctttaacggactgagcaaaacgtaccgcgttgcaggcttccgtcaggggtggatggtgttgaacgggccgaaaaaacacgccaaaggctacatcgaaggtctggaaatgctggctagtatgcgcctgtgtgctaacgttcctgcgcaacacgccattcagaccgcgctaggtggttatcagagcatcagtgaatttattacccctggcggtcgtctttatgagcagcgtaaccgcgcgtgggaactgatcaacgatattccgggcgtttcctgcgtgaaacctcgtggtgcgctgtatatgttcccgaaaatcgacgccaaacgctttaacattcacgacgatcagaaaatggtgttggatttcctgttgcaggaaaaagttctgttggtgcaagggacggcattcaactggccgtggccggatcacttccgcattgtcacgctaccgcgtgtcgatgatatcgagctgtctttgagcaagttcgcgcgtttcctttctggttatcatcagctgtaatcttaatttcactgccggagattgcatccggcagcgttatcccgccacaatgacctgatgatgtcatcatacgtaaggtcactatgaaacagagccatttttttgcccatctctcccgcctgaaactcattaaccgctggccgctcatgcgcaacgtgcggacggaaaatgtgtccgaacacagtttgcaggtagcgatggtcgcccatgcgctggcagctatcaaaaatcgaaaatttggcggtaatgtcaacgccgaacgtatcgctttactggcgatgtaccacgatgccagtgaagtgctcaccggcgatctccctactccggtgaaatacttcaatagccaaatcgctcaggagtacaaggctattgaaaaaatcgctcagcaaaaactggtcgatatggttccggaagagctgcgggatatctttgcgccgttaattgacgagcatgcatatagcgatgaagaaaaaagcctggtgaaacaggcagatgcactgtgtgcatatctgaaatgtctggaagaactcgcggccggaaataatgaattcttgctggcaaaaacgcgactggaagcgacgcttgaagcgcgtcgcagccaggagatggactacttcatggaaatatttgttcccagcttccatcttagcctcgatgagattagccaggatagtccgctgtaagcagccggagtctgcgtcgcatcaggcaataagcgccggatgcgacatcaggctcttgtcaaaacggaaacagcatcgggatcatcaccacacaaaccgccatcacgataatggtgaacggtacccccaacttcacaaagtcactgaagctgtaatttcccggacctaaaaccagtgtgttaacaggactagaaaccggtgtcataaaggcggcggatgctgccatcgccacgaccatcgcgaatggataagggctcacccccatcgttttggcagcagccagcgcaatcggagccatcaacaccgccgtcgcggtattagagataaatagcccaataaccgcgctcaagacaaacaaacaccccagcatcatatgtggcccgtaaccaccgccaatgtccatcagccctttcaccgccagcgcgacacctcccgttttctgtaatgccacagcaaacggcatcatcccaacgatcaaaataatgctcggccagtgaatggatttataggcgctttcagcatctatacagcggaatttccccatcagcaggcaggcgatgatagcggcaacaggattaggaatttcatctgtcagcattaacgccaccattagcaccagacagaaaatggcatggggtgcctggctgtgcgcgggacttgcttcactcacctcttccggtaagttcagcgctacgaagtcgcggccctgtttggccagcataccgatcagtttccagttacccacaaccaggatgatatcgcccagcagcagaggctcatccgccaggctaccttccagcgccacgccattgcgctttagccccaccacattcagtccgtagcgggtacgaaaaccaatttcgcgcacgcttttaccaatcagttcactctcaggaattaaactaatctctgccatgcccacatcaagggcctggtcagaaaaatactcgccgcgcagtaccatcggctccagcaattgctcactacaaaattgccggagatcgacatcagccgcagacatatcaataagcaaaacgtcacgcgcgcgaaattcagaaaccccattaacgttcacgataacgcgacgaaaacgccgccagcgttcaacaccgatgacgttagcgccataacgctcacgtaatttgagatcatccagccgttgaccaatcattgggcttccggggcgaatagccagacgtcgcgcacgcccggtcagtcgatattcacggataagatcgcgaaaggttcgacgcgtccagccttcgcgctgcggggtctgggtatcccctttcagcatgaaacgcatcactaacatatacaaaatacccagcaccagcacgaccaggccaataggtgttacgctaaagaaactgaagccgtgatagccttcacgcagcaattcactgttgactaccaggttcggcggcgtcgccaccagcgtcatcatgccgctaatcagcccggcaaaacttaacggcatcatcagacgactcgggctcgtttgcatacgcatggcaacgcttaacaccacgggaataaagatagcgacaacgccggtactactcataaacgcgccaagccccgcgacggtcagcatcaacaaaaccaacattttgatttcactattgcccgcaactttgaccagccatgttcccattacggtggcaacaccggtacggaccaaaccatcgccaataataaacaaggcggcaatcaggacaacgttaggatcagaaaagccggaaaatacttctgggactgtcagcgttccgcttaatgcaaacgcgacaataacaaacaaagcgaccgcatccatacgcactctgcccgtcgcaaacaagacgatggcaacggccagtaaactaagaacccaaatcaattcaccgttcacaacttatccttgttaattgagggggatgacttgattctgccataaaaaagccccgacgagacggggctaaatcatgatcaggtgtttcactgaataataacatcgccatttggctgtttggtcacagtaatttgctccagactgtggaggaccaaatcgacctcattcaggcgcggggtatctgccggagcgttaaccgcaatgacatgacaacccgccgccaggccagaaagcacgccagcgggagcatcttccaccaccacacactcctgcggcgcaagccccagcagctgcgcgcctaacagatacgcatcaggttctggttttccgcgcttcactcgctcagcggttacaaacacctctggtgcgggaagcccagctattttatggcgcgctcgcgctaccggcatggagccagaagtcacaatggcccacggaatacctgctttattcaaatgactgagtaaggcgattgcccccggaagcgcggtaataccttcggtttccgtggcctcgatgtgctccagacgcgtaaactcggcggcaatatcagcctcggatttgcccgccataaaatggcgcagagaggtgatcgcctgtttaccgtgaatgaaagccagcacctcttccggcgctaacccatgacgtctggcccagttgctccacgcccgttctaccgcaggcagggaatccaccagcgttccatcaagatcaaacagaaaacctttgcaccgcacgcgggcctcctcaggcattgataatttgattaatttcgttggcgctcaaatggtactgacgcgggcaggcatgccacacattaagcatgcgctgatatttttcccacattggcgtctgggcgttaaaaccgtgagttccggcgtcaaaatgggtatagcgcccttccacattaaccataaagcggacataaccgaggtaacgtgcttcagtggcggcgtcaaagccgaggaaggtgacacgacgttcatcgatggattgctggtcctgcaaattagaccaggaaacatgcaacgcatgatacatctccataatgtcgatgatagtgcggcaggtttcttctttcagctcgccaaactcgcgatccaattcacgcatctgtaatccgtaaccacgctcaataattgtttgcaggcgacggtaacgttcagcatttgccggatcgagcatagtcatcatcttgtactgattagacaaaataagacgttgcgcgttggtcatttccattgttgactcctgtatcactctactacggtgaaaaaaaagaaggctgagtatgccttcttttatatgcgtaatcaggggtcaattacaaatcatcaaggaaagttttatccagttgtttgaaggcgcgcttaagcgtgtcagctaatgcctggtaatcaggcttgccttcaacgggtgccaacacctgtccagactcctgcaatttaccgcgaacttcataaaaccagttaaggattgcagggggtaatggcgtgacagaacgcttgcccagccaccacaatccctgcatgggtaaacttaaggcgaacagggcagtggcaactgccggcccaagctgaccgcccagggcaatctgccagcagagagtaaatacggcgatcggcggcataaaacggatcgcataacgcgtcatcttgataacgcgattttcgacaaagaccggggcaaggcgtttttccagcggccacgtcttactgtaatgctgtccccggcgaaacaagctaaaaaaattaacagaacgattatccggcgtactcatgcttcacctcaacttcacatataaagattcaaaaatttgtgcaaattcacaactcagcgggacaacgttcaaaacattttgtcttccatacccactatcaggtatcctttagcagcctgaaggcctaagtagtacatattcattgagtcgtcaaattcatatacattatgccattggctgaaaattacgcaaaatggcatagactcaagatatttcttccatcatgcaaaaaaaatttgcagtgcatgatgttaatcataaatgtcggtgtcatcatgcgctacgctctatggctccctgacgtttttttagccacgtatcaattataggtacttccatgagcagtaagttagtactggttctgaactgcggtagttctagtctgaaatttgccatcatcgatgcagtaaatggtgaagagtacctttctggtttagccgaatgtttccacctgcccgaagcacgtatcaaatggaaaatggacggcaataaacaggaagcggctttaggtgcaggcgccgctcacagcgaagcgctcaactttatcgttaatactattctggcacaaaaaccagaactgtctgcgcagctgactgctatcggtcaccgtatcgtacacggcggcgaaaagtataccagctccgtagtgatcgatgagtctgttattcagggtatcaaagatgcagcttcttttgcaccgctgcacaacccggctcacctgatcggtatcgaagaagctctgaaatctttcccacagctgaaagacaaaaacgttgctgtatttgacaccgcgttccaccagactatgccggaagagtcttacctctacgccctgccttacaacctgtacaaagagcacggcatccgtcgttacggcgcgcacggcaccagccacttctatgtaacccaggaagcggcaaaaatgctgaacaaaccggtagaagaactgaacatcatcacctgccacctgggcaacggtggttccgtttctgctatccgcaacggtaaatgcgttgacacctctatgggcctgaccccgctggaaggtctggtcatgggtacccgttctggtgatatcgatccggcgatcatcttccacctgcacgacaccctgggcatgagcgttgacgcaatcaacaaactgctgaccaaagagtctggcctgctgggtctgaccgaagtgaccagcgactgccgctatgttgaagacaactacgcgacgaaagaagacgcgaagcgcgcaatggacgtttactgccaccgcctggcgaaatacatcggtgcctacactgcgctgatggatggtcgtctggacgctgttgtattcactggtggtatcggtgaaaatgccgcaatggttcgtgaactgtctctgggcaaactgggcgtgctgggctttgaagttgatcatgaacgcaacctggctgcacgtttcggcaaatctggtttcatcaacaaagaaggtacccgtcctgcggtggttatcccaaccaacgaagaactggttatcgcgcaagacgcgagccgcctgactgcctgatttcacaccgccagctcagctggcggtgctgttttgtaacccgccaaatcggcggtaacgaaagaggataaaccgtgtcccgtattattatgctgatccctaccggaaccagcgtcggtctgaccagcgtcagccttggcgtgatccgtgcaatggaacgcaaaggcgttcgtctgagcgttttcaaacctatcgctcagccgcgtaccggtggcgatgcgcccgatcagactacgactatcgtgcgtgcgaactcttccaccacgacggccgctgaaccgctgaaaatgagctacgttgaaggtctgctttccagcaatcagaaagatgtgctgatggaagagatcgtcgcaaactaccacgctaacaccaaagacgctgaagtcgttctggttgaaggtctggtcccgacacgtaagcaccagtttgcccagtctctgaactacgaaatcgctaaaacgctgaatgcggaaatcgtcttcgttatgtctcagggcactgacaccccggaacagctgaaagagcgtatcgaactgacccgcaacagcttcggcggtgccaaaaacaccaacatcaccggcgttatcgttaacaaactgaacgcaccggttgatgaacagggtcgtactcgcccggatctgtccgagattttcgacgactcttccaaagctaaagtaaacaatgttgatccggcgaagctgcaagaatccagcccgctgccggttctcggcgctgtgccgtggagctttgacctgatcgcgactcgtgcgatcgatatggctcgccacctgaatgcgaccatcatcaacgaaggcgacatcaatactcgccgcgttaaatccgtcactttctgcgcacgcagcattccgcacatgctggagcacttccgtgccggttctctgctggtgacttccgcagaccgtcctgacgtgctggtggccgcttgcctggcagccatgaacggcgtagaaatcggtgccctgctgctgactggcggttacgaaatggacgcgcgcatttctaaactgtgcgaacgtgctttcgctaccggcctgccggtatttatggtgaacaccaacacctggcagacctctctgagcctgcagagcttcaacctggaagttccggttgacgatcacgaacgtatcgagaaagttcaggaatacgttgctaactacatcaacgctgactggatcgaatctctgactgccacttctgagcgcagccgtcgtctgtctccgcctgcgttccgttatcagctgactgaacttgcgcgcaaagcgggcaaacgtatcgtactgccggaaggtgacgaaccgcgtaccgttaaagcagccgctatctgtgctgaacgtggtatcgcaacttgcgtactgctgggtaatccggcagagatcaaccgtgttgcagcgtctcagggtgtagaactgggtgcagggattgaaatcgttgatccagaagtggttcgcgaaagctatgttggtcgtctggtcgaactgcgtaagaacaaaggcatgaccgaaaccgttgcccgcgaacagctggaagacaacgtggtgctcggtacgctgatgctggaacaggatgaagttgatggtctggtttccggtgctgttcacactaccgcaaacaccatccgtccgccgctgcagctgatcaaaactgcaccgggcagctccctggtatcttccgtgttcttcatgctgctgccggaacaggtttacgtttacggtgactgtgcgatcaacccggatccgaccgctgaacagctggcagaaatcgcgattcagtccgctgattccgctgcggccttcggtatcgaaccgcgcgttgctatgctctcctactccaccggtacttctggtgcaggtagcgacgtagaaaaagttcgcgaagcaactcgtctggcgcaggaaaaacgtcctgacctgatgatcgacggtccgctgcagtacgacgctgcggtaatggctgacgttgcgaaatccaaagcgccgaactctccggttgcaggtcgcgctaccgtgttcatcttcccggatctgaacaccggtaacaccacctacaaagcggtacagcgttctgccgacctgatctccatcgggccgatgctgcagggtatgcgcaagccggttaacgacctgtcccgtggcgcactggttgacgatatcgtctacaccatcgcgctgactgcgattcagtctgcacagcagcagtaatctcgtcatcatccgcagctttgcgctgcggatatctgaaccggaaataatcactatttccggttttttattctcttaatttgcattaatcctttctgattatcttgcttaactgcgctgcatcaatgaattgcgccatcccactttgcatacttaccactttgttttgtgcaagggaatatttgcgctatgtccgcaatcactgaatccaaaccaacaagaagatgggcaatgcccgatacgttggtgattatcttttttgttgctattttaaccagccttgccacctgggtagttccggtggggatgtttgacagtcaggaagtgcagtatcaggttgatggtcaaacaaaaacacgcaaagtcgtagatccacacagttttcgcattctgactaacgaagcaggcgaacctgagtatcaccgcgtacagctgttcacgacgggcgatgaacgcccgggcctgatgaacttcccgtttgaaggattaaccagtggaagcaaatacgggacagccgttggcatcatcatgtttatgctggtgattggcggcgcgtttggcattgtgatgcgtacaggaaccattgataacggtatcctggcgcttattcgccatacccgcgggaatgaaattctctttattcctgcgctgtttattctgtttagtcttggcggcgcggtatttggtatgggagaagaggccgtcgcctttgccattatcatcgcaccgctaatggtccggctgggctatgacagtattaccaccgtcctggtgacctatattgccacgcaaatcggttttgccagtagctggatgaacccgttttgtgtggtcgttgctcaggggattgccggcgttccggtgctttctggctccgggttgcgtatcgtggtgtgggttatcgccactctgattggcctgatctttaccatggtgtacgccagtcgagtgaaaaagaatcctcttctgagtcgcgtgcatgagtccgaccgcttctttcgtgaaaagcaggctgatgttgaacaa
